(19) United States
(12) Patent Application Publication
(10) Pub. No.: US 2025/0236838 A1
(43) Pub. Date: Jul. 24, 2025

(54) E. COLI NISSLE STRAIN WITH IMPROVED TRANSFORMATION EFFICIENCY

(71) Applicant: Iowa State University Research Foundation, Inc., Ames, IA (US)

(72) Inventors: Thomas J. Mansell, Ames, IA (US); Chinmayi R. Gudi, Ames, IA (US)

(21) Appl. No.: 19/036,754

(22) Filed: Jan. 24, 2025

Related U.S. Application Data
(60) Provisional application No. 63/624,525, filed on Jan. 24, 2024.

(51) Int. Cl. C12N 1/20; A23L 33/135; C12N 9/22; C12N 15/113; C12N 15/87; C12R 1/19

(52) U.S. Cl. CPC C12N 1/205; A23L 33/135; C12N 9/22; C12N 15/113; C12N 15/87; C12N 2310/20; C12R 2001/19

(57) ABSTRACT

Disclosed are engineered E. coli Nissle strains having increased transformation efficiency. Also described are methods for generating transformants using the strains. Probiotic compositions containing the engineered E. coli Nissle strains and methods of using the probiotic compositions are also described herein.

### CROSS REFERENCE TO RELATED APPLICATIONS

[0001] This application claims priority to provisional application U.S. Ser. No. 63/624,525, filed Jan. 24, 2024, which is incorporated herein by reference in its entirety.

### GOVERNMENT SUPPORT

[0002] This invention was made with government support under R35 GM143074-01 awarded by the National Institutes of Health. The government has certain rights in the invention.

### SEQUENCE LISTING XML

[0003] The instant application contains a sequence listing, which has been submitted in XML file format by electronic submission and is hereby incorporated by reference in its entirety. Said XML file, created on Jan. 16, 2025, is named P14583US01.xml and is 10,865,159 bytes in size.

### TECHNICAL FIELD

[0004] The present disclosure relates generally to bacterial strains capable of improved transformation efficiencies.

### BACKGROUND

[0005] In recent years, the spotlight has increasingly focused on the gastrointestinal microflora, driving scientific, veterinary, and medical research interest. Consequently, probiotics, as live biotherapeutic agents, have garnered substantial attention. Among these, E. coli Nissle (EcN), a non-pathogenic gut isolate bacterium, is quickly gaining popularity. However, a formidable bottleneck in harnessing potential of EcN has been its poor transformation efficiency relative to other bacterial strains.

### SUMMARY

[0006] The need outlined above is met by the present disclosure which, in various embodiments, provides a novel engineered strain of E. coli Nissle, developed through adaptive laboratory evolution, showcasing a remarkable enhancement in transformation efficiency.

[0007] Engineered E. coli Nissle strains having increased transformation efficiency relative to wild type E. coli Nissle and derivatives thereof are provided. Probiotic compositions comprising the engineered E. coli Nissle strains of the disclosure are also provided.

[0008] Methods for establishing or maintaining a healthy gastrointestinal microbiota or reducing the effects of a gastrointestinal disorder in a subject comprising administering to the subject the engineered E. coli Nissle strains or probiotic compositions of the disclosure are provided.

[0009] Methods of obtaining an E. coli transformant comprising transforming a heterologous polynucleotide into the engineered E. coli Nissle strains of the disclosure are also provided.

[0010] Methods of altering a target nucleic acid sequence within an E. coli cell comprising providing a cell of an engineered E. coli Nissle strain of the disclosure with a Cas protein, a guide RNA, a donor nucleic acid sequence, and a recombinase are provided.

[0011] While multiple embodiments are disclosed, still other embodiments of the present disclosure will become apparent based on the detailed description, which shows and describes illustrative embodiments of the disclosure. Accordingly, the figures and detailed description are to be regarded as illustrative in nature and not restrictive.

### BRIEF DESCRIPTION OF THE FIGURES

[0012] The patent or application file contains at least one drawing executed in color. Copies of this patent or patent application publication with color drawing(s) will be provided by the Office upon request and payment of the necessary fee.

[0013] The following drawings form part of the specification and are included to further demonstrate certain embodiments. In some instances, embodiments can be best understood by referring to the accompanying figures in combination with the detailed description presented herein. The description and accompanying figures may highlight a certain specific example, or a certain embodiment. However, one skilled in the art will understand that portions of the example or embodiment may be used in combination with other examples or embodiments.

[0014] FIG. 1A is a schematic representation of the protocol for the engineered strain of EcN.

[0015] FIG. 1B shows the transformation efficiency of the two strains with plasmids of various ORIs.

[0016] FIG. 2 shows superimposed images of the motility assay run for 16 hours for both strains. The Zapped strain is tagged Scarlet, and the wildtype is Neon Green.

[0017] FIG. 3A-C shows growth curves of wildtype and engineered (Zapped) EcN in various concentrations of ethanol (FIG. 3A), different values of pH (FIG. 3B), and different concentrations of sucrose (FIG. 3C).

[0018] FIG. 4 is a schematic representation of assay to find hydrophobicity of E. coli cells.

[0019] FIG. 5 shows average amount of plasmid DNA miniprepped from the Zapped and wildtype strains.

[0020] FIG. 6A-B shows the average amount of plasmid DNA made by the Zapped and wildtype strains.

[0021] FIG. 7 shows growth assays in iron enriched media.

[0022] FIG. 8 shows transformation efficiencies using heat-shock transformation.

[0023] FIG. 9A shows ratios of the impact of the mutations identified from whole genome sequencing. FIG. 9B shows the breakdown of INDELs and SNPs. FIG. 9C shows the percentages of variants that were predicted to have a significant impact.

### DETAILED DESCRIPTION

[0024] So that the present disclosure may be more readily understood, certain terms are first defined. Unless defined otherwise, all technical and scientific terms used herein have the same meaning as commonly understood by one of ordinary skill in the art to which embodiments of the disclosure pertain. Many methods and materials similar, modified, or equivalent to those described herein can be used in the practice of the embodiments of the present disclosure without undue experimentation, the preferred materials and methods are described herein. In describing and claiming the embodiments of the present disclosure, the following terminology will be used in accordance with the definitions set out below.

[0025] It is to be understood that all terminology used herein is for the purpose of describing particular embodiments only, and is not intended to be limiting in any manner or scope. For example, as used in this specification and the appended claims, the singular forms “a,” “an” and “the” can include plural referents unless the content clearly indicates otherwise. Similarly, the word “or” is intended to include “and” unless the context clearly indicate otherwise. The word “or” means any one member of a particular list and also includes any combination of members of that list. Further, all units, prefixes, and symbols may be denoted in its SI accepted form.

[0026] Numeric ranges recited within the specification are inclusive of the numbers defining the range and include each integer within the defined range. Throughout this disclosure, various embodiments of this disclosure are presented in a range format. It should be understood that the description in range format is merely for convenience and brevity and should not be construed as an inflexible limitation on the scope of the disclosure. Accordingly, the description of a range should be considered to have specifically disclosed all the possible sub-ranges, fractions, and individual numerical values within that range. For example, description of a range such as from 1 to 6 should be considered to have specifically disclosed sub-ranges such as from 1 to 3, from 1 to 4, from 1 to 5, from 2 to 4, from 2 to 6, from 3 to 6 etc., as well as individual numbers within that range, for example, 1, 2, 3, 4, 5, and 6, and decimals and fractions, for example, 1.2, 3.8, 1½, and 4¾. This applies regardless of the breadth of the range.

[0027] As used herein, the term “administering” refers to the placement of a composition as disclosed herein into a subject by a method or route which results in at least partial delivery of the bacteria at a desired site. Compositions comprising the bacteria disclosed herein can be administered by any appropriate route which results in an effective treatment in the subject.

[0028] A “biologically pure culture” refers to a culture of bacteria containing no other bacterial species in quantities sufficient to interfere with the replication of the culture or be detected by normal bacteriological techniques. Stated another way, it is a culture wherein virtually all of the bacterial cells present are of the selected strain.

[0029] As used herein, the term “endogenous gene” refers to a native gene in its natural location in the genome of an organism.

[0030] As used herein, the term “engineered” in the context of a cell refers to a cell that has been genetically modified from its native state. For instance, an engineered E. coli cell may have nucleotide insertions, nucleotide deletions, nucleotide rearrangements, and nucleotide modifications introduced into their DNA. These genetic modifications may be present in the chromosome of the cell, or on a plasmid in the cell.

[0031] As used herein, the term “expression” refers to the transcription and stable accumulation of sense (mRNA) or anti-sense RNA derived from a nucleic acid, and/or to translation of an mRNA into a polypeptide.

[0032] As used herein, the term “gene” refers to a nucleic acid fragment that encodes a protein or fragment thereof, optionally including regulatory sequences preceding (5′ non-coding sequences) and following (3′ non-coding sequences) the coding sequence.

[0033] bacteria.

[0034] As used herein, a “heterologous polynucleotide”, “heterologous sequence”, or “heterologous nucleic acid” refers to a nucleic acid sequence that is not normally found in a given cell in nature. As used herein, a heterologous sequence encompasses a nucleic acid sequence that is exogenously introduced into a given cell.

[0035] As used herein, the term “isolated” refers to a material that is substantially or essentially free from components that normally accompany it in its native state. For example, an isolated bacterial strain may refer to a bacterial strain that has been purified or removed from naturally or non-naturally occurring components that are present in its naturally occurring environment.

[0036] “Microbiome” refers to the genetic content of the communities of microbes that live in and on the human body, both sustainably and transiently, including eukaryotes, archaea, bacteria, and viruses (including bacterial viruses (i.e., phage)), wherein “genetic content” includes genomic DNA, RNA such as ribosomal RNA, the epigenome, plasmids, and all other types of genetic information.

[0037] “Microbiota” refers to the community of microorganisms that inhabit (sustainably or transiently) in and/or on a subject, (e.g., a mammal such as a human), including, but not limited to, eukaryotes (e.g., protozoa), archaea, bacteria, and viruses (including bacterial viruses, i.e., a phage).

[0038] A “nucleic acid” or “nucleic acid sequence” may be any molecule, preferably a polymeric molecule, incorporating units of ribonucleic acid, deoxyribonucleic acid or an analog thereof. The nucleic acid can be either single-stranded or double-stranded. A single-stranded nucleic acid can be one nucleic acid strand of a denatured double-stranded DNA. Alternatively, it can be a single-stranded nucleic acid not derived from any double-stranded DNA. In one aspect, the nucleic acid can be DNA. In another aspect, the nucleic acid can be RNA. Suitable nucleic acid molecules are DNA, including genomic DNA or cDNA. Other suitable nucleic acid molecules are RNA, including mRNA.

[0039] The term “operatively linked” includes having an appropriate transcription start signal (e.g., promoter) in front of the polynucleotide sequence to be expressed, and having an appropriate translation start signal (e.g., a Shine Delgarno sequence and a start codon (ATG)) in front of the polypeptide coding sequence and maintaining the correct reading frame to permit expression of the polynucleotide sequence under the control of the expression control sequence, and, optionally, production of the desired polypeptide encoded by the polynucleotide sequence. In some examples, transcription of a gene encoding a recombinant polypeptide as described herein is under the control of a promoter sequence (or other transcriptional regulatory sequence) which controls the expression of the nucleic acid in a cell-type in which expression is intended. It will also be understood that the gene encoding a recombinant polypeptide as described herein can be under the control of transcriptional regulatory sequences which are the same or which are different from those sequences which control transcription of the naturally-occurring form of a protein.

[0040] The terms “overexpression” or “overexpress”, as used herein refers to the expression of a functional nucleic acid, polypeptide or protein encoded by DNA in a host cell, wherein the nucleic acid, polypeptide or protein is either not normally present in the host cell, or wherein the nucleic acid, polypeptide or protein is present in the host cell at a higher level than that normally expressed from the endogenous gene encoding the nucleic acid, polypeptide or protein.

[0041] A “pharmaceutical composition”, as used herein, refers to a composition comprising an active ingredient (e.g., an E. coli cell) with other components such as a pharmaceutically suitable carrier.

[0042] As used herein, the term “pharmaceutically acceptable” or “pharmacologically acceptable” refers to those compounds, materials, compositions, and/or dosage forms which are, within the scope of sound medical judgment, suitable for use in contact with the tissues of human beings and animals without excessive toxicity, irritation, allergic response, or other problem or complication, commensurate with a reasonable benefit/risk ratio. Moreover, for animal (e.g., human) administration, it will be understood that compositions should meet sterility, pyrogenicity, general safety and purity standards as required by the FDA Office of Biological Standards.

[0043] As used herein, the term “pharmaceutically acceptable carrier” means a pharmaceutically-acceptable material, composition or vehicle, such as a liquid or solid filler, diluent, excipient, manufacturing aid (e.g., lubricant, talc magnesium, calcium or zinc stearate, or steric acid), or solvent encapsulating material, involved in carrying or transporting the subject compound from one organ, or portion of the body, to another organ, or portion of the body. Each carrier must be “acceptable” in the sense of being compatible with the other ingredients of the formulation and not injurious to the patient. Some examples of materials which can serve as pharmaceutically-acceptable carriers include: (1) sugars, such as lactose, glucose and sucrose; (2) starches, such as corn starch and potato starch; (3) cellulose, and its derivatives, such as sodium carboxymethyl cellulose, methylcellulose, ethyl cellulose, microcrystalline cellulose and cellulose acetate; (4) powdered tragacanth; (5) malt; (6) gelatin; (7) lubricating agents, such as magnesium stearate, sodium lauryl sulfate and talc; (8) excipients, such as cocoa butter and suppository waxes; (9) oils, such as peanut oil, cottonseed oil, safflower oil, sesame oil, olive oil, corn oil and soybean oil; (10) glycols, such as propylene glycol; (11) polyols, such as glycerin, sorbitol, mannitol and polyethylene glycol (PEG); (12) esters, such as ethyl oleate and ethyl laurate; (13) agar; (14) buffering agents, such as magnesium hydroxide and aluminum hydroxide; (15) alginic acid; (16) pyrogen-free water; (17) isotonic saline; (18) Ringer's solution; (19) ethyl alcohol; (20) pH buffered solutions; (21) polyesters, polycarbonates and/or polyanhydrides; (22) bulking agents, such as polypeptides and amino acids (23) serum component, such as serum albumin, HDL and LDL; (22) C2-C12 alcohols, such as ethanol; and (23) other non-toxic compatible substances employed in pharmaceutical formulations. Wetting agents, coloring agents, release agents, coating agents, disintegrating agents, binders, sweetening agents, flavoring agents, perfuming agents, protease inhibitors, plasticizers, emulsifiers, stabilizing agents, viscosity increasing agents, film forming agents, solubilizing agents, surfactants, preservative and antioxidants can also be present in the formulation. The terms such as “excipient”, “carrier”, “pharmaceutically acceptable excipient” or the like are used interchangeably herein.

[0044] As used herein, the terms “pharmaceutically effective” or “therapeutically effective” shall mean an amount of a composition that is sufficient to show a meaningful benefit, i.e., treatment, prevention, amelioration, or a decrease in the frequency of the condition or symptom being treated.

[0045] A “plasmid” or “vector” includes a nucleic acid construct designed for delivery to a host cell or transfer between different host cell. The nucleic acid incorporated into the plasmid can be operatively linked to an expression control sequence when the expression control sequence controls and regulates the transcription and translation of that polynucleotide sequence.

[0046] As used herein “preventing” or “prevention” refers to any methodology where the disease state does not occur due to the actions of the methodology (such as, for example, administration of a composition as described herein). In certain embodiments, it is understood that prevention can also mean that the disease is not established to the extent that occurs in untreated controls. For example, there can be a 5, 10, 15, 20, 25, 30, 35, 40, 50, 60, 70, 80, 90, or 100% reduction in the establishment of disease frequency relative to untreated controls. Accordingly, prevention of a disease (e.g., a gastrointestinal disease or disorder), encompasses a reduction in the likelihood that a subject will develop the disease, relative to an untreated subject (e.g., a subject who does not receive a composition as described herein).

[0047] “Probiotic”, as used herein, refers to a live, non-pathogenic microorganism, e.g., a bacterium, which can confer health benefits to a host organism. Certain species, strains, and/or subtypes of non-pathogenic bacteria are currently recognized as probiotic.

[0048] A “promoter” as used herein, refers to a nucleotide sequence that is capable of controlling the expression of a coding sequence or gene. Promoters are generally located 5′ of the sequence that they regulate. Promoters may be derived in their entirety from a native gene, or be composed of different elements derived from promoters found in nature, and/or comprise synthetic nucleotide segments. Those skilled in the art will readily ascertain that different promoters may regulate expression of a coding sequence or gene in response to a particular stimulus, e.g., in a cell-specific or tissue-specific manner, in response to different environmental or physiological conditions, or in response to specific compounds. Prokaryotic promoters are typically classified into two classes: inducible and constitutive. “Constitutive promoter” refers to a promoter that is capable of facilitating continuous transcription of a coding sequence or gene under its control and/or to which it is operably linked. An “inducible promoter” refers to a promoter that initiates increased levels of transcription of the coding sequence or gene under its control in response to a stimulus or an exogenous environmental condition. A “directly inducible promoter” refers to a regulatory region, wherein the regulatory region is operably linked to a gene encoding a protein or polypeptide, where, in the presence of an inducer of said regulatory region, the protein or polypeptide is expressed. An “indirectly inducible promoter” refers to a regulatory system comprising two or more regulatory regions, for example, a first regulatory region that is operably linked to a first gene encoding a first protein, polypeptide, or factor, e.g., a transcriptional regulator, which is capable of regulating a second regulatory region that is operably linked to a second gene, the second regulatory region may be activated or repressed, thereby activating or repressing expression of the second gene. Both a directly inducible promoter and an indirectly inducible promoter are encompassed by “inducible promoter.” For example, and without limitation, chemical agents, temperature, and light may be used for induction of the promoters contemplated herein.

[0049] As used herein, the terms “protein” and “polypeptide” are used interchangeably herein to designate a series of amino acid residues, connected to each other by peptide bonds between the alpha-amino and carboxy groups of adjacent residues. The terms “protein”, and “polypeptide” refer to a polymer of amino acids, including modified amino acids (e.g., phosphorylated, glycated, glycosylated, etc.) and amino acid analogs, regardless of its size or function. The terms “protein” and “polypeptide” as used herein refer to both large polypeptides and small peptides. The terms “protein” and “polypeptide” are used interchangeably herein when referring to a gene product and fragments thereof. Thus, exemplary polypeptides or proteins include gene products, naturally occurring proteins, homologs, orthologs, paralogs, fragments and other equivalents, variants, fragments, and analogs of the foregoing.

[0050] The term “subject” refers to any organism or animal subject that is an object of a method or material, including mammals, e.g., humans, laboratory animals (e.g., primates, rats, mice, rabbits), livestock (e.g., pigs, cows, horses, sheep, and goats), and household pets (e.g., dogs, cats, and rodents). As used herein, a subject can refer to a human or a non-human. Synonyms used herein include “patient” and “animal”.

[0051] “Treatment,” “treat,” or “treating” means a method of reducing the effects of a disease or condition. Treatment can also refer to a method of reducing the disease or condition itself rather than just the symptoms. The treatment can be any reduction from pre-treatment levels and can be but is not limited to the complete ablation of the disease, condition, or the symptoms of the disease or condition. Therefore, in the disclosed methods, “treatment” can refer to a 10%, 20%, 30%, 40%, 50%, 60%, 70%, 80%, 90%, or 100% reduction in the severity of an established disease or the disease progression. For example, a disclosed method for reducing the effects of a gastrointestinal disorder is considered to be a treatment if there is a 10% reduction in one or more symptoms of the disease in a subject with a gastrointestinal disorder when compared to pre-treatment levels in the same subject or control subjects. Thus, the reduction can be a 10, 20, 30, 40, 50, 60, 70, 80, 90, 100%, or any amount of reduction in between as compared to native or control levels. It is understood and herein contemplated that “treatment” does not necessarily refer to a cure of the disease or condition, but an improvement in the outlook of a disease or condition (e.g., a gastrointestinal disorder).

[0052] The gut microbiome comprises of billions of microbes featuring up to 1000 species. It plays a vital role in regulating metabolic functions of the body, training the immune system, and fighting pathogens. The microbes that inhabit the gut have profound effects on the digestive, cardiovascular, endocrine, neurological, and nervous systems. A vast majority of diseases and medical conditions can be linked to the GI tract. Hence, manipulating the gut microbiome by restoring or diversifying the ecosystem is crucial in healthcare and medicine. One method of manipulating the gut microbiome is using pharmabiotics, such as prebiotics, probiotics, and synbiotics.

[0053] E. coli Nissle 1917 (EcN) is a non-pathogenic bacteria discovered by Alfred Nissle in 1917 while studying Salmonella in humans. EcN was found to compete with pathogenic enterobacteria for iron and hence, inhibits their growth in the gut. Since discovery, EcN has become a popular probiotic. It is being engineered towards applications in non-invasive diagnosis and biotherapeutics. The viability of EcN as a probiotic relies on several limiting factors. Firstly, EcN colonizes poorly in the human GI tract. The high stability of the chromosome causes EcN to resist genetic modification, making bioengineering difficult. This manifests as poor transformation efficiency and recombineering in EcN. Adaptive lab evolution (ALE) presents a novel strategy for harnessing natural selection towards achieving specific goals in bioengineering. Using this strategy, a strain of EcN was engineered that shows improved transformation efficiency. The strain is a first-of-its-kind attempt to alleviate concerns regarding the transformation efficiency in EcN. Described herein, inter alia, are engineered E. coli Nissle strains having improved transformation efficiency.

[0054] The genetic changes that underlie the improved performance of the E. coli Nissle strain were identified. In certain embodiments, the engineered E. coli Nissle strain comprises one or more (2, 3, 4, 5, 6, 7, 8, 9, 10, etc.) of the mutations set forth in Table 5. In certain embodiments, the engineered E. coli Nissle strain comprises all of the mutations set forth in Table 5.

[0055] In certain embodiments, the mutation is at a position corresponding to position 257307, 261611, 287006, 313346, 372997, 547536, 577005, 619073, 905646, 948388, 1100140, 1106624, 1155295, 1155975, 1207958, 1214983, 1217272, 1330104, 1330105, 1431503, 1511516, 1559408, 1642042, 1693592, 1738308, 1775453, 1797994, 1802903, 1833436, 1908015, 1946344, 1954709, 1972000, 2029609, 2072645, 2150037, 2180269, 2188100, 2203779, 2222419, 2231010, 2275579, 2290073, 2338206, 2343227, 2370965, 2469948, 2472325, 2534241, 2673940, 2722786, 2723200, 2727344, 2740342, 2823249, 2825576, 2925375, 2984481, 3091331, 3109405, 3131290, 3190080, 3234031, 3290228, 3318100, 3381051, 3394188, 3408230, 3408232, 3408236, 3408254, 3408260, 3408264, 3408265, 3408271, 3408282, 3408298, 3408302, 3408310, 3408312, 3408319, 3408320, 3408324, 3408327, 3408332, 3408334, 3408339, 3408343, 3408346, 3408350, 3408353, 3408361, 3408363, 3408367, 3408369, 3408384, 3408401, 3408457, 3408468, 3408471, 3408480, 3410228, 3410238, 3410240, 3410243, 3410249, 3413110, 3451296, 3520054, 3554413, 3604748, 3640318, 3764568, 3844856, 3873401, 3888054, 4048903, 4175223, 4208844, 4208848, 4208851, 4265268, 4341919, 4383425, 4404105, 4463623, 4463628, 4463630, 4463634, 4463637, 4463638, 4463640, 4463644, 4463645, 4463650, 4463653, 4463655, 4463658, 4463660, 4463664, 4463678, 4463679, 4463692, 4463745, 4463757, 4609507, 4610114, 4649091, 4709868, 4729061, 4753558, 4756638, 4826691, 4826713, 4826728, 4826746, 4826749, 4826752, 4827732, 4827736, 4827746, 4827747, 4827750, 4827753, 4827763, 4827766, 4827770, 4827772, 4827774, 4827776, 4827778, 4889725, 4902377, 4976107, 5000528, 5010102, 5041738, 5068216, 5077148, 5080926, 5113156, 5125848, 5153839, 5153866, 5153890, 5163940, 5191207, 5249790, 5249835, 5249841, 5249844, 5249853, 5249856, 5249862, 5249877, 5249881, 5249886, 5249889, 5249892, 5249896, 5249910, 5249916, 5249931, 5249941, 5249943, 5249946, 5249949, 5249955, 5249958, 5249961, 5249970, 5249977, 5249981, 5249984, 5249988, 5249997, 5250003, 5250006, 5250009, 5250018, 5250021, 5250027, 5250034, 5250042, 5250402, 5250405, 5250417, 5250420, 5250424, 5250426, 5250432, 5250434, 5250435, 5250438, 5250441, 5250443, 5250468, 5250477, 5250478, 5250480, 5250483, 5250492, 5250504, 5250505, 5250507, 5250522, 5250524, 5250528, 5250532, 5250534, 5250540, 5250549, 5250552, 5250561, 5250564, 5250573, 5250576, 5304113, 5304115, 5304118, 5304124, 5304250, 5332501, 5345202, 5345207, 5345240, 5345241, 5345243, 5345245, 5345258, 5345263, 5345273, 5345280, 5345284, 5345285, 5345294, 5346922, 5374165, 5374166, 5374167, 5374172, 5374175, 5374184, 5374190, 5374195, 5374199, 5374202, 5374203, 5376958, 5428111, or 5430346 of the wild type E. coli Nissle strain set forth in SEQ ID NO: 1.

[0056] In certain embodiments, the mutation is a change from ‘TG’ to ‘T’ at position 257307, from ‘C’ to ‘CA’ at position 261611, from ‘CG’ to ‘C’ at position 287006, from ‘TG’ to ‘T’ at position 313346, from ‘AC’ to ‘A’ at position 372997, from ‘TC’ to ‘T’ at position 547536, from ‘CA’ to ‘C’ at position 577005, from ‘CT’ to ‘C’ at position 619073, from ‘TC’ to ‘T’ at position 905646, from ‘TC’ to ‘T’ at position 948388, from ‘TC’ to ‘T’ at position 1100140, from ‘TG’ to ‘T’ at position 1106624, from ‘CG’ to ‘C’ at position 1155295, from ‘TG’ to ‘T’ at position 1155975, from ‘TG’ to ‘T’ at position 1207958, from ‘AG’ to ‘A’ at position 1214983, from ‘AG’ to ‘A’ at position 1217272, from ‘A’ to ‘ATTC’ at position 1330104, from ‘A’ to ‘AGTAAACCAC’ (SEQ ID NO: 3) at position 1330105, from ‘G’ to ‘T’ at position 1431503, from ‘TA’ to ‘T’ at position 1511516, from ‘TC’ to ‘T’ at position 1559408, from ‘TG’ to ‘T’ at position 1642042, from ‘G’ to ‘GT’ at position 1693592, from ‘TC’ to ‘T’ at position 1738308, from ‘T’ to ‘TA’ at position 1775453, from ‘TC’ to ‘T’ at position 1797994, from ‘C’ to ‘CT’ at position 1802903, from ‘TC’ to ‘T’ at position 1833436, from ‘C’ to ‘CA’ at position 1908015, from ‘TC’ to ‘T’ at position 1946344, from ‘TC’ to ‘T’ at position 1954709, from ‘C’ to ‘CA’ at position 1972000, from ‘G’ to ‘GT’ at position 2029609, from ‘G’ to ‘GT’ at position 2072645, from ‘CG’ to ‘C’ at position 2150037, from ‘CT’ to ‘C’ at position 2180269, from ‘CT’ to ‘C’ at position 2188100, from ‘TC’ to ‘T’ at position 2203779, from ‘TG’ to ‘T’ at position 2222419, from ‘TC’ to ‘T’ at position 2231010, from ‘TG’ to ‘T’ at position 2275579, from ‘AT’ to ‘A’ at position 2290073, from ‘TC’ to ‘T’ at position 2338206, from ‘CA’ to ‘C’ at position 2343227, from ‘TC’ to ‘T’ at position 2370965, from ‘TC’ to ‘T’ at position 2469948, from ‘TC’ to ‘T’ at position 2472325, from ‘TC’ to ‘T’ at position 2534241, from ‘TC’ to ‘T’ at position 2673940, from ‘TC’ to ‘T’ at position 2722786, from ‘TC’ to ‘T’ at position 2723200, from ‘TC’ to ‘T’ at position 2727344, from ‘TC’ to ‘T’ at position 2740342, from ‘TG’ to ‘T’ at position 2823249, from ‘GA’ to ‘G’ at position 2825576, from ‘TC’ to ‘T’ at position 2925375, from ‘C’ to ‘CA’ at position 2984481, from ‘GC’ to ‘G’ at position 3091331, from ‘TC’ to ‘T’ at position 3109405, from ‘TC’ to ‘T’ at position 3131290, from ‘TC’ to ‘T’ at position 3190080, from ‘TG’ to ‘T’ at position 3234031, from ‘CG’ to ‘C’ at position 3290228, from ‘CA’ to ‘C’ at position 3318100, from ‘TC’ to ‘T’ at position 3381051, from ‘TC’ to ‘T’ at position 3394188, from ‘C’ to ‘G’ at position 3408230, from ‘G’ to ‘A’ at position 3408232, from ‘G’ to ‘A’ at position 3408236, from ‘C’ to ‘T’ at position 3408254, from ‘C’ to ‘G’ at position 3408260, from ‘A’ to ‘T’ at position 3408264, from ‘G’ to ‘C’ at position 3408265, from ‘G’ to ‘A’ at position 3408271, from ‘A’ to ‘C’ at position 3408282, from ‘CACT’ to ‘C’ at position 3408298, from ‘GGCA’ to ‘G’ at position 3408302, from ‘C’ to ‘A’ at position 3408310, from ‘ACCACC’ to ‘A’ at position 3408312, from ‘C’ to ‘G’ at position 3408319, from ‘A’ to ‘AAAAAT’ at position 3408320, from ‘C’ to ‘CTCT’ at position 3408324, from ‘C’ to ‘A’ at position 3408327, from ‘A’ to ‘AGCCT’ at position 3408332, from ‘C’ to ‘CTGCTACGGCCTGGTGTTT’ (SEQ ID NO: 4) at position 3408334, from ‘C’ to ‘CACGCCACTTTTCCATT’ (SEQ ID NO: 5) at position 3408339, from ‘A’ to ‘ATATCT’ at position 3408343, from ‘AC’ to ‘A’ at position 3408346, from ‘C’ to ‘T’ at position 3408350, from ‘GTTACA’ to ‘G’ at position 3408353, from ‘G’ to ‘A’ at position 3408361, from ‘A’ to ‘AT’ at position 3408363, from ‘A’ to ‘C’ at position 3408367, from ‘G’ to ‘GT’ at position 3408369, from ‘T’ to ‘C’ at position 3408384, from ‘A’ to ‘C’ at position 3408401, from ‘T’ to ‘C’ at position 3408457, from ‘T’ to ‘C’ at position 3408468, from ‘C’ to ‘T’ at position 3408471, from ‘A’ to ‘G’ at position 3408480, from ‘G’ to ‘A’ at position 3410228, from ‘A’ to ‘G’ at position 3410238, from ‘T’ to ‘C’ at position 3410240, from ‘G’ to ‘A’ at position 3410243, from ‘C’ to ‘G’ at position 3410249, from ‘TG’ to ‘T’ at position 3413110, from ‘G’ to ‘GT’ at position 3451296, from ‘TC’ to ‘T’ at position 3520054, from ‘CA’ to ‘C’ at position 3554413, from ‘AG’ to ‘A’ at position 3604748, from ‘TC’ to ‘T’ at position 3640318, from ‘TC’ to ‘T’ at position 3764568, from ‘TC’ to ‘T’ at position 3844856, from ‘CG’ to ‘C’ at position 3873401, from ‘G’ to ‘T’ at position 3888054, from ‘TC’ to ‘T’ at position 4048903, from ‘AG’ to ‘A’ at position 4175223, from ‘AG’ to ‘A’ at position 4208844, from ‘A’ to ‘G’ at position 4208848, from ‘T’ to ‘C’ at position 4208851, from ‘CG’ to ‘C’ at position 4265268, from ‘TC’ to ‘T’ at position 4341919, from ‘G’ to ‘GT’ at position 4383425, from ‘TA’ to ‘T’ at position 4404105, from ‘T’ to ‘TGAGC’ at position 4463623, from ‘A’ to ‘AC’ at position 4463628, from ‘G’ to ‘GCAT’ at position 4463630, from ‘A’ to ‘C’ at position 4463634, from ‘T’ to ‘G’ at position 4463637, from ‘T’ to ‘TCGG’ at position 4463638, from ‘CA’ to ‘C’ at position 4463640, from ‘G’ to ‘C’ at position 4463644, from ‘C’ to ‘T’ at position 4463645, from ‘A’ to ‘AAAGTACCTGCATT’ (SEQ ID NO: 6) at position 4463650, from ‘G’ to ‘GAGA’ at position 4463653, from ‘T’ to ‘TCA’ at position 4463655, from ‘T’ to ‘TCGGCCAGG’ at position 4463658, from ‘T’ to ‘C’ at position 4463660, from ‘GAAAA’ to ‘G’ at position 4463664, from ‘A’ to ‘G’ at position 4463678, from ‘A’ to ‘AGC’ at position 4463679, from ‘T’ to ‘TCCACCATGTTTGAGTTTGTTCCGGAAAGTCTTTCCGGGTC’ (SEQ ID NO: 7) at position 4463692, from ‘A’ to ‘G’ at position 4463745, from ‘G’ to ‘A’ at position 4463757, from ‘A’ to ‘ACCGTGTACGTACAAGCAGTGGGAGCCTCTTAATGGGGTGACTGCGTACCTTTTGT ATAATGGGTCAGCGACTTATATTCTGTAGCAAGGTTAACCGAATAGGGGAGCCGAA GGGAAACCGAGTCTTAACTGGGCGTTAAGTTGCAGGGTATAGACCCGAAACCCGGT GATCTAGCCATGGGCAGGTTGAAGGTTGGGTAACACTAACTGGAGGACCGAACCGA CTAATGTTGAAAAATTAGCGGATGACTTGTGGCTGGGGGTGAAAGGCCAATCAAAC CGGGAGATAGCTGGTTCTCCCCGAAAGCTATTTAGGTAGCGCCTCGTGAATTCATCT CCGGGGGTAGAGCACTGTTTCGGCAAGGGGGTCATCCCGACTTACCAACCCGATGC AAACTGCGAATACCGGAGAATGTTATCACGGGAGACACACGGCGGGTGCTAACGTC CGTCGTGAAGAGGGAAACAACCCAGACCGCCAGCTAAGGTCCCAAAGTCATGGTTA AGTGGGAAACGATGTGGGAAGGCCCAGACAGCCAGGATGTTGGCTTAGAAGCAGC CATCATTTAAAGAAAGCGTAATAGCTCACTGGTCGAGTCGGCCTGCGCGGAAGATG TAACGGGGCTAAACCATGCACCGAAGCTGCGGCAGCGACACTATGTGTTGTTGGGT AGGGGAGCGTTCTGTAAGCCTGTGAAGGTGGCCTGTGAGGGTTGCTGGAGGTATCA GAAGTGCGAATGCTGACATAAGTAACGATAAAGCGGGTGAAAAGCCCGCTCGCCG GAAGACCAAGGGTTCCTGTCCAACGTTAATCGGGGCAGGGTGAGTCGACCCCTAAG GCGAGGCCGAAAGGCGTAGTCGATGGGAAACAGGTTAATATTCCTGTACTTGGTGT TACTGCGAAGGGGGGACGGAGAAGGCTATGTTGGCCGGGCGACGGTTGTCCCGGTT TAAGCGTGTAGGCTGGTTTTCCAGGCAAATCCGGAAAACCAAGGCTGAGGCGTGAT GACGAGGCACTACGGTGCTGAAGCGACAAATGCCCTGCTTCCAGGAAAAGCCTCTA AGCATCAGGTAACATCAAATCGTACCCCAAACCGACACAGGTGGTCAGGTAGAGAA TACCAAGGCGCTTGAGAGAACTCGGGTGAAGGAACTAGGCAAAATGGTGCCGTAA CTTCGGGAGAAGGCACGCTGATATGTAGGTGAAGCGACTTGCTCGTGGAGCTGAAA TCAGTCGAAGATACCAGCTGGCTGCAACTGTTTATTAAAAACACAGCACTGTGCAA ACACGAAAGTGGACGTATACGGTGTGACGCCTGCCCGGTGCCGGAAGGTTAATTGA TGGGGTTAGCGGTAACGCGAAGCTCTTGATCGAAGCCCCGGTAAACGGCGGCCGTA ACTATAACGGTCCTAAGGTAGCGAAATTCCTTGTCGGGTAAGTTCCGACCTGCACG AATGGCGTAATGATGGCCAGGCTGTCTCCACCCGAGACTCAGTGAAATTGAACTCG CTGTGAAGATGCAGTGTACCCGCGGCAAGACGGAAAGACCCCGTGAACCTTTACTA TAGCTTGACACTGAACATTGAGCCTTGATGTGTAGGATAGGTGGGAGGCTTTGAAG TGTGGACGCCAGTCTGCATGGAGCCGACCTTGAAATACCACCCTTTAATGTTTGATG TTCTAACGTTGGCCCGTAATCCGGGTTGCGGACAGTGTCTGGTGGGTAGTTTGACTG GGGCGGTCTCCTCCTAAAGAGTAACGGAGGAGCACGAAGGTTGGCTAATCCTGGTC GGACATCAGGAGGTTAGTGCAATGGCATAAGCCAGCTTGACTGCGAGCGTGACGGC GCGAGCAGGTGCGAAAGCAGGTCATAGTGATCCGGTGGTTCTGAATGGAAGGGCCA TCGCTCAACGGATAAAAGGTACTCCGGGGATAACAGGCTGATACCGCCCAAGAGTT CATATCGACGGCGGTGTTTGGCACCTCGATGTCGGCTCATCACATCCTGGGGCTGAA GTAGGTCCCAAGGGTATGGCTGTTCGCCATTTAAAGTGGTACGCGAGCTGGGTTTA GAACGT’ (SEQ ID NO: 8) at position 4609507, from ‘TC’ to ‘T’ at position 4610114, from ‘TC’ to ‘T’ at position 4649091, from ‘C’ to ‘CA’ at position 4709868, from ‘TC’ to ‘T’ at position 4729061, from ‘TG’ to ‘T’ at position 4753558, from ‘C’ to ‘T’ at position 4756638, from ‘G’ to ‘A’ at position 4826691, from ‘A’ to ‘T’ at position 4826713, from ‘G’ to ‘T’ at position 4826728, from ‘C’ to ‘T’ at position 4826746, from ‘T’ to ‘C’ at position 4826749, from ‘T’ to ‘C’ at position 4826752, from ‘AGT’ to ‘A’ at position 4827732, from ‘T’ to ‘TCG’ at position 4827736, from ‘G’ to ‘T’ at position 4827746, from ‘A’ to ‘C’ at position 4827747, from ‘T’ to ‘C’ at position 4827750, from ‘C’ to ‘T’ at position 4827753, from ‘G’ to ‘A’ at position 4827763, from ‘G’ to ‘A’ at position 4827766, from ‘C’ to ‘T’ at position 4827770, from ‘G’ to ‘A’ at position 4827772, from ‘A’ to ‘T’ at position 4827774, from ‘A’ to ‘T’ at position 4827776, from ‘G’ to ‘GGCGC’ at position 4827778, from ‘TG’ to ‘T’ at position 4889725, from ‘TC’ to ‘T’ at position 4902377, from ‘TC’ to ‘T’ at position 4976107, from ‘G’ to ‘GT’ at position 5000528, from ‘TC’ to ‘T’ at position 5010102, from ‘CA’ to ‘C’ at position 5041738, from ‘TC’ to ‘T’ at position 5068216, from ‘TC’ to ‘T’ at position 5077148, from ‘T’ to ‘C’ at position 5080926, from ‘CA’ to ‘C’ at position 5113156, from ‘T’ to ‘C’ at position 5125848, from ‘A’ to ‘G’ at position 5153839, from ‘G’ to ‘A’ at position 5153866, from ‘A’ to ‘T’ at position 5153890, from ‘CG’ to ‘C’ at position 5163940, from ‘G’ to ‘T’ at position 5191207, from ‘T’ to ‘C’ at position 5249790, from ‘T’ to ‘C’ at position 5249835, from ‘G’ to ‘T’ at position 5249841, from ‘G’ to ‘A’ at position 5249844, from ‘A’ to ‘G’ at position 5249853, from ‘C’ to ‘G’ at position 5249856, from ‘C’ to ‘G’ at position 5249862, from ‘A’ to ‘G’ at position 5249877, from ‘C’ to ‘T’ at position 5249881, from ‘T’ to ‘A’ at position 5249886, from ‘C’ to ‘G’ at position 5249889, from ‘T’ to ‘C’ at position 5249892, from ‘G’ to ‘A’ at position 5249896, from ‘C’ to ‘G’ at position 5249910, from ‘C’ to ‘T’ at position 5249916, from ‘C’ to ‘G’ at position 5249931, from ‘T’ to ‘C’ at position 5249941, from ‘A’ to ‘C’ at position 5249943, from ‘C’ to ‘A’ at position 5249946, from ‘C’ to ‘T’ at position 5249949, from ‘G’ to ‘A’ at position 5249955, from ‘T’ to ‘C’ at position 5249958, from ‘C’ to ‘G’ at position 5249961, from ‘C’ to ‘T’ at position 5249970, from ‘C’ to ‘T’ at position 5249977, from ‘C’ to ‘CG’ at position 5249981, from ‘TA’ to ‘T’ at position 5249984, from ‘G’ to ‘C’ at position 5249988, from ‘G’ to ‘A’ at position 5249997, from ‘T’ to ‘C’ at position 5250003, from ‘G’ to ‘C’ at position 5250006, from ‘G’ to ‘C’ at position 5250009, from ‘A’ to ‘G’ at position 5250018, from ‘T’ to ‘G’ at position 5250021, from ‘T’ to ‘C’ at position 5250027, from ‘C’ to ‘T’ at position 5250034, from ‘G’ to ‘A’ at position 5250042, from ‘C’ to ‘T’ at position 5250402, from ‘C’ to ‘T’ at position 5250405, from ‘T’ to ‘C’ at position 5250417, from ‘C’ to ‘G’ at position 5250420, from ‘C’ to ‘T’ at position 5250424, from ‘A’ to ‘G’ at position 5250426, from ‘T’ to ‘A’ at position 5250432, from ‘G’ to ‘A’ at position 5250434, from ‘C’ to ‘G’ at position 5250435, from ‘A’ to ‘G’ at position 5250438, from ‘T’ to ‘C’ at position 5250441, from ‘A’ to ‘G’ at position 5250443, from ‘T’ to ‘C’ at position 5250468, from ‘A’ to ‘G’ at position 5250477, from ‘A’ to ‘C’ at position 5250478, from ‘A’ to ‘G’ at position 5250480, from ‘G’ to ‘C’ at position 5250483, from ‘C’ to ‘T’ at position 5250492, from ‘G’ to ‘T’ at position 5250504, from ‘C’ to ‘A’ at position 5250505, from ‘G’ to ‘C’ at position 5250507, from ‘T’ to ‘TA’ at position 5250522, from ‘GC’ to ‘G’ at position 5250524, from ‘A’ to ‘G’ at position 5250528, from ‘A’ to ‘G’ at position 5250532, from ‘T’ to ‘C’ at position 5250534, from ‘C’ to ‘G’ at position 5250540, from ‘C’ to ‘T’ at position 5250549, from ‘T’ to ‘C’ at position 5250552, from ‘A’ to ‘G’ at position 5250561, from ‘G’ to ‘A’ at position 5250564, from ‘A’ to ‘G’ at position 5250573, from ‘T’ to ‘G’ at position 5250576, from ‘G’ to ‘A’ at position 5304113, from ‘A’ to ‘G’ at position 5304115, from ‘G’ to ‘A’ at position 5304118, from ‘T’ to ‘C’ at position 5304124, from ‘A’ to ‘C’ at position 5304250, from ‘CA’ to ‘C’ at position 5332501, from ‘T’ to ‘C’ at position 5345202, from ‘A’ to ‘G’ at position 5345207, from ‘C’ to ‘G’ at position 5345240, from ‘TC’ to ‘T’ at position 5345241, from ‘A’ to ‘T’ at position 5345243, from ‘G’ to ‘GA’ at position 5345245, from ‘A’ to ‘AC’ at position 5345258, from ‘CT’ to ‘C’ at position 5345263, from ‘A’ to ‘G’ at position 5345273, from ‘CCG’ to ‘C’ at position 5345280, from ‘G’ to ‘C’ at position 5345284, from ‘G’ to ‘GAC’ at position 5345285, from ‘A’ to ‘G’ at position 5345294, from ‘TG’ to ‘T’ at position 5346922, from ‘G’ to ‘T’ at position 5374165, from ‘G’ to ‘A’ at position 5374166, from ‘C’ to ‘A’ at position 5374167, from ‘A’ to ‘AG’ at position 5374172, from ‘TC’ to ‘T’ at position 5374175, from ‘G’ to ‘A’ at position 5374184, from ‘A’ to ‘C’ at position 5374190, from ‘C’ to ‘G’ at position 5374195, from ‘A’ to ‘T’ at position 5374199, from ‘G’ to ‘A’ at position 5374202, from ‘T’ to ‘A’ at position 5374203, from ‘TG’ to ‘T’ at position 5376958, from ‘AC’ to ‘A’ at position 5428111, from ‘G’ to ‘GTGCGTTTGCAGCAC’ (SEQ ID NO: 9) at position 5430346 of the wild type E. coli Nissle strain set forth in SEQ ID NO: 1.

[0057] In certain embodiments, the mutation is located in one or more genes selected from ECOLIN_01245, ECOLIN_01235, ECOLIN_01465, ECOLIN_01570, ECOLIN_01800, ECOLIN_02590, ECOLIN_02735, ECOLIN_02915, ECOLIN_04325, ECOLIN_04550, ECOLIN_05190, ECOLIN_05225, ECOLIN_05515, ECOLIN_05765, ECOLIN_05835, ECOLIN_05860, ECOLIN_06500, ECOLIN_07110, ECOLIN_07475, ECOLIN_07715, ECOLIN_08080, ECOLIN_08295, ECOLIN_08490, ECOLIN_08670, ECOLIN_08785, ECOLIN_08815, ECOLIN_09000, ECOLIN_09345, ECOLIN_09555, ECOLIN_09600, ECOLIN_09660, ECOLIN_09995, ECOLIN_10230, ECOLIN_10720, ECOLIN_10880, ECOLIN_10920, ECOLIN_10995, ECOLIN_11035, ECOLIN_11065, ECOLIN_11170, ECOLIN_11200, ECOLIN_11435, ECOLIN_11470, ECOLIN_11585, ECOLIN_12000, ECOLIN_12005, ECOLIN_12290, ECOLIN_12890, ECOLIN_13120, ECOLIN_13135, ECOLIN_13170, ECOLIN_13585, ECOLIN_13590, ECOLIN_13975, ECOLIN_14250, ECOLIN_14825, ECOLIN_15025, ECOLIN_15290, ECOLIN_15460, ECOLIN_15675, ECOLIN_15840, ECOLIN_16160, ECOLIN_16210, ECOLIN_16295, ECOLIN_16300, ECOLIN_16315, ECOLIN_16345, ECOLIN_16530, ECOLIN_16875, ECOLIN_17025, ECOLIN_17265, ECOLIN_17435, ECOLIN_18045, ECOLIN_18570, ECOLIN_18720, ECOLIN_18785, ECOLIN_19485, ECOLIN_20030, ECOLIN_20180, ECOLIN_20530, ECOLIN_20865, ECOLIN_21080, ECOLIN_21155, ECOLIN_21485, ECOLIN_22180, ECOLIN_22185, ECOLIN_22350, ECOLIN_22645, ECOLIN_22710, ECOLIN_22830, ECOLIN_22825, ECOLIN_23160, ECOLIN_23165, ECOLIN_23560, ECOLIN_23655, ECOLIN_23965, ECOLIN_24070, ECOLIN_24140, ECOLIN_24275, ECOLIN_24410, ECOLIN_24460, ECOLIN_24475, ECOLIN_24655, ECOLIN_24715, ECOLIN_24845, ECOLIN_24895, ECOLIN_25060, ECOLIN_25390, ECOLIN_25740, ECOLIN_25870, ECOLIN_25925, ECOLIN_25930, ECOLIN_26080, ECOLIN_26075, ECOLIN_26325, and ECOLIN_26350.

[0058] In certain embodiments, the engineered E. coli Nissle strain of the disclosure comprises a genome sequence having at least 80%, at least 85%, at least 90%, at least 95%, at least 98%, at least 99%, at least 99.5% at least 99.6% at least 99.7% at least 99.8%, at least 99.9%, or 100% sequence identity to SEQ ID NO: 2.

[0059] A sample of the engineered E. coli Nissle strain of the disclosure has been deposited with the American Type Culture Collection (ATCC), 10801 University Boulevard, Manassas, VA 20110-2209, U.S.A., under the Budapest Treaty on ______ and has been assigned the following accession number: PTA-______.

[0060] The strain has been deposited under conditions that assure that access to the strain will be available during the pendency of this patent application to one determined by the Commissioner of Patents and Trademarks to be entitled thereto under 37 CFR 1.14 and 35 USC 122. Further, the culture deposit will be stored and made available to the public in accord with the provisions of the Budapest Treaty for the Deposit of Microorganisms, i.e., it will be stored with all the care necessary to keep it viable and uncontaminated for a period of at least five years after the most recent request for the furnishing of a sample of the deposit, and in any case, for a period of at least 30 (thirty) years after the date of deposit or for the enforceable life of any patent which may issue disclosing the strain. The depositor acknowledges the duty to replace the deposit should the depository be unable to furnish a sample when requested, due to the condition of the deposit. All restrictions on the availability to the public of the culture deposit will be irrevocably removed upon the granting of a patent disclosing it.

[0061] Derivatives of the engineered E. coli Nissle strain are also provided. As used herein, the phrase “derivatives thereof”, when used in the context of an engineered E. coli Nissle strain, refers to any strain that is obtained from the engineered E. coli Nissle strain. Derivatives of an engineered E. coli Nissle strain include, but are not limited to, variants of the strain obtained by selection, variants of the strain selected by mutagenesis and selection, and a genetically transformed strain obtained from the engineered E. coli Nissle strain.

[0062] The engineered E. coli Nissle strains described herein are useful for producing E. coli transformants. In certain embodiments, a method of obtaining an E. coli transformant, comprising transforming a heterologous polynucleotide into an engineered E. coli Nissle strain of the disclosure is provided. In certain embodiments, a method of obtaining an E. coli transformant, comprising: (a) cultivating an engineered E. coli Nissle of the disclosure; (b) transforming a heterologous polynucleotide into the strain of (a); and (c) isolating the transformant strain resulting from (b) is provided.

[0063] The transformed DNA described herein can be any DNA of interest. The DNA may be of genomic, cDNA, semisynthetic, synthetic origin, or any combinations thereof. The DNA may be a heterologous polynucleotide that encodes any polypeptide having biological activity of interest or may be a DNA involved in the expression of the polypeptide having biological activity, e.g., a promoter.

[0064] The polypeptide having a biological activity may be any polypeptide of interest. The polypeptide may be native or foreign to the E. coli cell. The polypeptide may be naturally occurring allelic and engineered variations of the below-mentioned polypeptides and hybrid polypeptides.

[0065] The term “polypeptide” is not meant herein to refer to a specific length of the encoded product and, therefore, encompasses peptides, oligopeptides, and proteins. The term “polypeptide” also encompasses hybrid polypeptides, which comprise a combination of partial or complete polypeptide sequences obtained from at least two different polypeptides wherein one or more may be foreign to the E. coli cell. Polypeptides further include naturally occurring allelic and engineered variations of a polypeptide.

[0066] In certain embodiments, the polypeptide is an antibody, antigen, antimicrobial peptide, enzyme, growth factor, hormone, immunodilator, neurotransmitter, receptor, reporter protein, structural protein, or transcription factor.

[0067] In certain embodiments, the polypeptide is a hybrid polypeptide, which comprises a combination of partial or complete polypeptide sequences obtained from at least two different polypeptides wherein one or more may be foreign to the E. coli cell.

[0068] In certain embodiments, the polypeptide is a fused polypeptide in which another polypeptide is fused at the N-terminus or the C-terminus of the polypeptide or fragment thereof. A fused polypeptide is produced by fusing a nucleotide sequence (or a portion thereof) encoding one polypeptide to a nucleotide sequence (or a portion thereof) encoding another polypeptide. Techniques for producing fusion polypeptides are known in the art, and include, ligating the coding sequences encoding the polypeptides so that they are in frame and expression of the fused polypeptide is under control of the same promoter(s) and terminator.

[0069] The heterologous polynucleotide may be obtained from any prokaryotic, eukaryotic, or other source. Techniques used to isolate or clone a heterologous polynucleotide are known in the art and include isolation from genomic DNA, preparation from cDNA, or a combination thereof. The cloning of the DNA of interest from such genomic DNA can be effected, e.g., by using the well known polymerase chain reaction (PCR). See, for example, Innis et al., PCR Protocols: A Guide to Methods and Application, Academic Press, New York, 1990. The cloning procedures may involve excision and isolation of a desired nucleic acid fragment, insertion of the fragment into a vector molecule, and incorporation of the recombinant vector into the engineered E. coli strain where multiple copies or clones of the nucleic acid sequence will be replicated. The DNA may be of genomic, cDNA, RNA, semisynthetic, synthetic origin, or any combinations thereof.

[0070] A heterologous polynucleotide may be manipulated in a variety of ways to provide for expression in an engineered E. coli strain. Manipulation of the polynucleotide sequence prior to its insertion into a vector may be desirable or necessary depending on the expression vector. The techniques for modifying polynucleotide sequences utilizing recombinant DNA methods are well known in the art.

[0071] A nucleic acid construct comprising a polynucleotide encoding a polypeptide may be operably linked to one or more (e.g., two, several) control sequences capable of directing expression of the coding sequence in an engineered E. coli strain of the present disclosure under conditions compatible with the control sequences.

[0072] The control sequence may be an appropriate promoter sequence, a nucleotide sequence that is recognized by an engineered E. coli strain of the present disclosure for expression of the polynucleotide encoding the polypeptide. The promoter sequence contains transcriptional control sequences that mediate expression of the polypeptide. The promoter may be any nucleotide sequence that shows transcriptional activity in the engineered E. coli strain, including mutant, truncated, and hybrid promoters, and may be obtained from genes encoding extracellular or intracellular polypeptides either native or foreign to the engineered E. coli strain.

[0073] Examples of suitable promoters for directing the transcription of the nucleic acid constructs in an engineered E. coli strain include an E. coli σ^{s} promoter, a an E. coli σ³² promoter, an E. coli σ⁷⁰ promoter, a Bacillus subtilis σ^{A} promoter, a Bacillus subtilis σ^{B} promoter, a bacteriophage T7 promoter, an E. coli lac operon promotor, and E. coli trc promoter. Further promoters are described in “Useful proteins from recombinant bacteria” in Gilbert et al., Scientific American 1980, 242, 74-94; and in Sambrook et al., 1989, supra.

[0074] The control sequence may also be a suitable transcription terminator sequence, a sequence recognized by an engineered E. coli strain to terminate transcription. The terminator sequence is operably linked to the 3′ terminus of the nucleotide sequence encoding the heterologous polypeptide. Any terminator that is functional in a E. coli strain may be used.

[0075] The control sequence may also be a suitable leader sequence, a nontranslated region of mRNA that is important for translation by an engineered E. coli strain. The leader sequence is operably linked to the 5′ terminus of the nucleotide sequence encoding the heterologous polypeptide. Any leader sequence that is functional in the engineered E. coli strain may be used.

[0076] The control sequence may also be a signal peptide coding sequence that codes for an amino acid sequence linked to the amino terminus of a polypeptide and directs the encoded polypeptide into the cell's secretory pathway. The 5′ end of the coding sequence of the nucleotide sequence may inherently contain a signal peptide coding sequence naturally linked in translation reading frame with the segment of the coding sequence that encodes the secreted polypeptide. Alternatively, the 5′ end of the coding sequence may contain a signal peptide coding sequence that is foreign to the coding sequence. The foreign signal peptide coding sequence may be required where the coding sequence does not naturally contain a signal peptide coding sequence. Alternatively, the foreign signal peptide coding sequence may simply replace the natural signal peptide coding sequence in order to enhance secretion of the polypeptide. However, any signal peptide coding sequence that directs the expressed polypeptide into the secretory pathway of the engineered E. coli strain, i.e., secreted into a culture medium, may be used in the present disclosure.

[0077] A recombinant expression vector comprising a nucleotide sequence, a promoter, and transcriptional and translational stop signals may be used for the recombinant production of a polypeptide of interest. The various nucleic acids and control sequences described herein may be joined together to produce a recombinant expression vector that may include one or more (e.g., two, several) convenient restriction sites to allow for insertion or substitution of the nucleotide sequence encoding the polypeptide at such sites. Alternatively, the nucleotide sequence may be expressed by inserting the nucleotide sequence or a nucleic acid construct comprising the sequence into an appropriate vector for expression. In creating the expression vector, the coding sequence is located in the vector so that the coding sequence is operably linked with the appropriate control sequences for expression.

[0078] The recombinant expression vector may be any vector (e.g., a plasmid or virus) that can be conveniently subjected to recombinant DNA procedures and can bring about expression of the nucleotide sequence. The choice of the vector will typically depend on its compatibility with the engineered E. coli strain into which the vector is to be introduced. The vector may be a linear or closed circular plasmid.

[0079] The vector may be an autonomously replicating vector, i.e., a vector that exists as an extrachromosomal entity, the replication of which is independent of chromosomal replication, e.g., a plasmid, an extrachromosomal element, a minichromosome, or an artificial chromosome. The vector may contain any means for assuring self-replication. Alternatively, the vector may be one that, when introduced into the engineered E. coli strain, is integrated into the genome and replicated together with the chromosome(s) into which it has been integrated. Furthermore, a single vector or plasmid or two or more vectors or plasmids that together contain the total DNA to be introduced into the genome of the engineered E. coli strain, or a transposon, may be used.

[0080] The vector may contain one or more (e.g., two, several) selectable markers that permit easy selection of transformed engineered E. coli strains. A selectable marker is a gene the product of which provides for biocide or viral resistance, resistance to heavy metals, prototrophy to auxotrophs, and the like.

[0081] Examples of selectable markers for use in the engineered E. coli strain include, but are not limited to, markers that confer antibiotic resistance such as ampicillin, chloramphenicol, kanamycin, or tetracycline resistance.

[0082] The vectors may contain one or more (e.g., two, several) elements that permit integration of the vector into the E. coli genome or autonomous replication of the vector in the cell independent of the genome.

[0083] For integration into the genome of the engineered E. coli strain, the vector may rely on the polynucleotide sequence encoding a polypeptide or any other element of the vector for integration into the genome by homologous or nonhomologous recombination. Alternatively, the vector may contain additional nucleotide sequences for directing integration by homologous recombination into the genome of the engineered E. coli strain at a precise location(s) in the chromosome. To increase the likelihood of integration at a precise location, the integrational elements should preferably contain a sufficient number of nucleic acids, such as 100 to 1,500 base pairs, preferably 400 to 1,500 base pairs, and most preferably 800 to 1,500 base pairs, which have a high degree of identity to the corresponding target sequence to enhance the probability of homologous recombination. The integrational elements may be any sequence that is homologous with the target sequence in the genome of the engineered E. coli strain. Furthermore, the integrational elements may be non-encoding or encoding nucleotide sequences. On the other hand, the vector may be integrated into the genome of the engineered E. coli strain by non-homologous recombination.

[0084] For autonomous replication, the vector may further comprise an origin of replication enabling the vector to replicate autonomously in the engineered E. coli strain. The origin of replication may be any plasmid replicator mediating autonomous replication that functions in a cell. The term “origin of replication” or “plasmid replicator” is defined herein as a nucleotide sequence that enables a plasmid or vector to replicate in vivo. Examples of bacterial origins of replication useful in the engineered E. coli strain are the origins of replication of plasmids pBR322, pUC19, pACYC177, and pACYC184 permitting replication in E. coli.

[0085] The procedures used to ligate the elements described herein to construct the recombinant expression vectors are well known to one skilled in the art (see, e.g., J. Sambrook, E. F. Fritsch, and T. Maniatus, 1989, Molecular Cloning, A Laboratory Manual, 2d edition, Cold Spring Harbor, New York).

[0086] The DNA can also be a control sequence, e.g., promoter, for manipulating the expression of a gene of interest. Non-limiting examples of control sequences are described above.

[0087] The DNA can further be a nucleic acid construct for inactivating a gene of interest in an E. coli cell.

[0088] The DNA is not to be limited in scope by the specific examples disclosed above, since these examples are intended as illustrations of several embodiments of the disclosure.

[0089] Transformation of the DNA into the engineered E. coli strains can be conducted using techniques known in the art, such as electroporation or heat shock as described in the Examples section below.

[0090] The transformants described herein can be isolated using standard techniques well-known in the art, including, but not limited to, streak plate isolation, growth in enrichment or selective media, temperature growth selection, filtration, or single cell isolation techniques, such as flow cytometry and microfluidics.

[0091] In certain embodiments, the engineered E. coli Nissle strain of the disclosure may comprise a disruption of an endogenous gene. The disruption of the endogenous gene may be carried out using methods well known in the art. A portion of the gene can be disrupted such as the coding region or a control sequence required for expression of the coding region. Such a control sequence of the gene may be a promoter sequence or a functional part thereof, i.e., a part that is sufficient for affecting expression of the gene. For example, a promoter sequence may be inactivated resulting in no expression or a weaker promoter may be substituted for the native promoter sequence to reduce expression of the coding sequence. Other control sequences for possible modification include, but are not limited to, a leader, propeptide sequence, signal sequence, transcription terminator, and transcriptional activator.

[0092] Gene deletion techniques to eliminate or reduce expression of a gene may be used with the engineered E. coli Nissle strain of the disclosure. Gene deletion techniques enable the partial or complete removal of the gene thereby eliminating expression. In such methods, deletion of the gene is accomplished by homologous recombination using a plasmid that has been constructed to contiguously contain the 5′ and 3′ regions flanking the gene.

[0093] In certain embodiments, one or more (e.g., two, several) nucleotides in a gene or a control sequence thereof required for the transcription or translation thereof are introduced, substituted, and/or removed. For example, nucleotides may be inserted or removed for the introduction of a stop codon, the removal of the start codon, or a frame-shift of the open reading frame. Such a modification may be accomplished by site-directed mutagenesis or PCR generated mutagenesis in accordance with methods known in the art. See, for example, Botstein and Shortle, Science 1985, 229, 4719; Lo et al., Proc. Natl. Acad. Sci. U.S.A. 1985, 81, 2285; Higuchi et al., Nucleic Acids Res 1988, 16, 7351; Shimada, Meth. Mol. Biol. 1996, 57, 157; Ho et al., Gene 1989, 77, 61; Horton et al., Gene 1989, 77, 61; and Sarkar and Sommer, BioTechniques 1990, 8, 404.

[0094] Gene disruption techniques by inserting into a gene a disruptive nucleic acid construct comprising a nucleic acid fragment homologous to the gene that will create a duplication of the region of homology and incorporate construct DNA between the duplicated regions may be used. Such a gene disruption can eliminate gene expression if the inserted construct separates the promoter of the gene from the coding region or interrupts the coding sequence such that a non-functional gene product results. A disrupting construct may be simply a selectable marker gene accompanied by 5′ and 3′ regions homologous to the gene. The selectable marker enables identification of transformants containing the disrupted gene.

[0095] The process of gene conversion (see, for example, Iglesias and Trautner, Molecular General Genetics 1983, 189, 73-76) may also be used with the engineered E. coli Nissle strain of the disclosure. For example, in the gene conversion method, a nucleotide sequence corresponding to the gene is mutagenized in vitro to produce a defective nucleotide sequence, which is then transformed into the E. coli strain to produce a defective gene. By homologous recombination, the defective nucleotide sequence replaces the endogenous gene. It may be desirable that the defective nucleotide sequence also comprises a marker for selection of transformants containing the defective gene.

[0096] Established anti-sense techniques using a nucleotide sequence complementary to the nucleotide sequence of the gene (Parish and Stoker, FEMS Microbiol. Lett. 1997, 154, 151-157) may also be used. More specifically, expression of the gene may be reduced or inactivated by introducing a nucleotide sequence complementary to the nucleotide sequence of the gene, which may be transcribed in the strain and is capable of hybridizing to the mRNA produced in the strain. Under conditions allowing the complementary anti-sense nucleotide sequence to hybridize to the mRNA, the amount of protein translated is thus reduced or eliminated.

[0097] Random or specific mutagenesis may also be performed using methods well known in the art, including, but not limited to, chemical mutagenesis (see, for example, Hopwood, The Isolation of Mutants in Methods in Microbiology (J. R. Norris and D. W. Ribbons, eds.) pp. 363-433, Academic Press, New York, 1970). Modification of a gene may be performed by subjecting the engineered E. coli Nissle strain of the disclosure to mutagenesis and screening for strains in which expression of a gene has been reduced or inactivated. The mutagenesis, which may be specific or random, may be performed, for example, by use of a suitable physical or chemical mutagenizing agent, use of a suitable oligonucleotide, or subjecting the DNA sequence to PCR generated mutagenesis. Furthermore, the mutagenesis may be performed by use of any combination of these mutagenizing methods.

[0098] Examples of a physical or chemical mutagenizing agent suitable for the present purpose include ultraviolet (UV) irradiation, hydroxylamine, N-methyl-N′-nitro-N-nitrosoguanidine (MNNG), N-methyl-N′-nitrosogaunidine (NTG) O-methyl hydroxylamine, nitrous acid, ethyl methane sulphonate (EMS), sodium bisulphite, formic acid, and nucleotide analogues. When such agents are used, the mutagenesis is typically performed by incubating the strain to be mutagenized in the presence of the mutagenizing agent of choice under suitable conditions, and selecting for mutants exhibiting reduced or no expression of the gene.

[0099] In certain embodiments, the modification is unmarked with a selectable marker. Removal of the selectable marker gene may be accomplished by culturing the strain on a counter-selection medium. Where the selectable marker gene contains repeats flanking its 5′ and 3′ ends, the repeats will facilitate the looping out of the selectable marker gene by homologous recombination when the strain is submitted to counter-selection. The selectable marker gene may also be removed by homologous recombination by introducing into the strain a nucleic acid fragment comprising 5′ and 3′ regions of the defective gene, but lacking the selectable marker gene, followed by selecting on the counter-selection medium. By homologous recombination, the defective gene containing the selectable marker gene is replaced with the nucleic acid fragment lacking the selectable marker gene. Other methods known in the art may also be used.

[0100] Methods of altering a target nucleic acid sequence within an E. coli cell are also provided. In certain embodiments, the methods comprise providing the cell with a Cas protein. In certain embodiments, the methods comprise providing the cell with a guide RNA. In certain embodiments, the methods comprise providing the cell with a donor nucleic acid sequence. In certain embodiments, the methods comprise providing the cell with a recombinase. In certain embodiments, the E. coli cell is the engineered E. coli Nissle strain deposited under ATCC accession number PTA-______, or a derivative thereof. In certain embodiments, the Cas protein is a Cas9 protein. In certain embodiments, a plurality of guide RNAs that are complementary to different target nucleic acid sequences are provided to the cell and the different target nucleic acid sequences are altered. In certain embodiments, the guide RNA and/or Cas protein are provided on a vector. In certain embodiments, the vector is a plasmid. In certain embodiments, the guide RNA, Cas protein, donor nucleic acid sequence, and/or recombinase are provided on one or more plasmids and provided to the cell by electroporation. In certain embodiments, the donor nucleic acid sequence is introduced into the cell as a single stranded nucleic acid. In certain embodiments, the donor nucleic acid sequence is introduced into the cell as a double stranded nucleic acid. In certain embodiments, the recombinase is a λ-Red recombination system. The terms “λ-Red recombinase”, “λ-Red recombination system”, and “λ-Red system” are used interchangeably to describe a group of enzymes encoded by the bacteriophage λ genes exo, bet, and gam. The enzymes encoded by the three genes work together to increase the rate of homologous recombination in E. coli, which is generally considered to have a relatively low rate of homologous recombination.

[0101] The present disclosure provides an engineered E. coli Nissle strain of the disclosure for use as probiotic, in foodstuff, or as a pharmaceutical composition.

[0102] A composition that includes the engineered E. coli Nissle strain of the disclosure can include a pharmaceutically acceptable carrier. A pharmaceutically acceptable carrier should be non-toxic to the E. coli and to the subject, and also can optionally include an ingredient that promotes viability of the E. coli during storage. Liquid or gel-based carriers are well known in the art, such as water, fruit juice, glucose or fructose solutions, physiological electrolyte solutions, and glycols such propylene glycol. Carriers also include oleaginous carries such as, for example, white petrolatum, isopropyl myristate, lanolin or lanolin alcohols, mineral oil, fragrant or essential oil, nasturtium extract oil, sorbitan mono-oleate, cetylstearyl alcohol, hydroxypropyl cellulose (MW=100,000 to 1,000,000), or detergents (e.g., polyoxyl stearate or sodium lauryl sulfate). Other suitable carriers include water-in-oil or oil-in-water emulsions and mixtures of emulsifiers and emollients are provided.

[0103] A composition that includes the engineered E. coli Nissle strain of the disclosure also can include natural or synthetic flavorings and food-quality coloring agents, thickening agents such as corn starch, guar gum, xanthan gum and the like, binders, disintegrators, coating agents, lubricants, stabilizers, solubilizing agents, suspending agents, excipients, and diluents. Additional components also can be included that, for example, improve palatability, improve shelf-life, and impart nutritional benefits. It would be understood by those in the art that any additional components in a composition must be compatible with maintaining the viability of the engineered E. coli Nissle strain.

[0104] In certain embodiments, the composition comprising engineered E. coli Nissle strain is a foodstuff. Foodstuffs include any number of food products that are suitable for human consumption such as, without limitation, milk, yogurt, juices, water, cereals, chewing gum, crackers, candies, cookies, vitamin supplements, meats, and fruits or vegetables (i.e., blended fruits or vegetables such as, e.g., baby food). Foodstuffs also include feed products (e.g., suitable for consumption by livestock or companion animals) including dry animal feeds.

[0105] In certain embodiments, the engineered E. coli Nissle strain and a prebiotic are combined prior to administration to produce a symbiotic. Prebiotics are defined in the art as an “ingredient that allows specific changes, both in the composition and/or activity in the gastrointestinal microbiota that confers benefits upon host well-being and health” (see, for example, Roberfroid, 1998, Br. J. Nutr., 80: S197-202). Well characterized prebiotics include, for example, galacto-oligosaccharide (GOS), fructooligosaccharide (FOS), and inulin. GOS and FOS refer to a group of oligomeric, non-digestible carbohydrates that are produced from lactose using beta-galactosidases to catalyze transgalactosylation reactions. These beta-linked glycosides are recalcitrant to digestion by host-secreted enzymes in the small intestine, such that they reach the colon intact and are available to the colonic microbiota. It would be understood by those skilled in the art that other compounds that fall within the definition of a prebiotic also can be used in the compositions and methods described herein.

[0106] Administration of a composition that includes the engineered E. coli Nissle strain of the disclosure can be accomplished by any method that delivers at least a portion of the E. coli into the digestive tract of a subject. Therefore, enteral administration is preferred (e.g., orally, sublingually, or rectally), although other routes are not excluded. Generally, the formulation of a composition is dependent upon its intended route of delivery. For example, a composition that includes the engineered E. coli Nissle strain of the disclosure can be formulated as a powder, a granule, a tablet, a capsule, a liquid suspension, a paste, or a syrup.

[0107] An effective amount of the engineered E. coli Nissle strain of the disclosure is an amount that achieves a desired result (e.g., treatment or maintenance) in the absence of a toxic, immunological, or allergic reaction in the subject. An effective amount can be at least 10⁴ viable colony forming units per day (CFU/day; e.g., at least 10⁶ CFU/day, 10⁸ to 10¹² CFU/day, or 10¹⁰ CFU/day), which can be administered in a single dose or over multiple doses (e.g., over days, weeks, months or years). When the engineered E. coli Nissle strain of the disclosure is administered over a long period of time (e.g., to maintain a healthy gastrointestinal flora), the effective amount may be less than the foregoing range (e.g., 10 CFU/day to 10³ CFU/day). It would be understood by those in the art that the engineered E. coli Nissle strain of the disclosure can be administered in an amount that exceeds the foregoing range as E. coli Nissle is considered highly safe and has been given GRAS (Generally Recognized as Safe) status by the U.S. Food and Drug Administration (FDA).

[0108] Probiotics are reported to produce health benefits which include (1) alleviation of intestinal disorders such as constipation and diarrhea caused by infection by pathogenic organisms, antibiotics, or chemotherapy; (2) stimulation and modulation of the immune system; (3) anti-tumor effects due to inactivation or inhibition of carcinogenic compounds in the gastrointestinal tract by reduction of intestinal bacterial enzyme activities such as beta-glucuronidase, azoreductase, and nitroreductase; (4) reduced production of toxic end products such as ammonia, phenols and other metabolites of protein known to influence liver cirrhosis (5) reduction in serum cholesterol and blood pressure; (6) maintenance of mucosal integrity; (7) alleviation of symptoms of lactose intolerance; (8) prevention of vaginitis. Accordingly, the beneficial effects attributed to probiotics include increased resistance to infectious diseases, healthier immune systems, reduction in irritable bowel syndrome, reductions in blood pressure, reduced serum cholesterol, milder allergies and tumor regression. In animals, for example, probiotics can enhance weight gain or weight loss and improve meat quality, and milk production. Significantly, probiotics can be used to establish and maintain a healthy (e.g., balanced) gastrointestinal flora in an animal and to reduce the effect of gastrointestinal diseases. Gastrointestinal diseases include, without limitation, diarrhea, constipation, loose stool, abdominal inflation, ulcerous colitis, Crohn's disease, irritable bowel syndrome, hypersensitive intestinal syndromes, food toxicity, food allergy, pseudomembranous colitis, hemorrhagic colitis, gastritis, gastroduodenal ulcer, dental caries, and periodontitis. See, for example, Vaughan, Gastrointestinal Microbiology, 2006, CRC Press.

[0109] In certain embodiments, the engineered E. coli Nissle strain of the disclosure can be administered with one or more additional probiotic microbial strains. Examples of additional probiotic microorganisms that can be used include yeasts such as Saccharomyces, Candida, Pichia and Torulopsis, moulds such as Aspergillus, Rhizopus, Mucor, and Penicillium and bacteria such as the genera Lactobacillus, Bifidobacterium, Clostridium, Leuconostoc, Bacteroides, Staphylococcus, Lactococcus, Bacillus, Streptococcus, Fusobacterium, Propionibacterium, Enterococcus, Pediococcus, and Micrococcus. Representative examples of additional probiotic microorganisms that can be used include Saccharomyces cereviseae, Bacillus coagulans, Bacillus licheniformis, Bacillus subtilis, Bifidobacterium bifidum, Bifidobacterium infantis, Bifidobacterium longum, Enterococcus faecium, Enterococcus faecalis, Lactobacillus acidophilus, Lactobacillus alimentarius, Lactobacillus casei, Lactobacillus curvatus, Lactobacillus delbruckii, Lactobacillus johnsonii, Lactobacillus farciminus, Lactobacillus gasseri, Lactobacillus helveticus, Lactobacillus rhamnosus, Lactobacillus sake, Lactococcus lactis, Micrococcus varians, Pediococcus acidilactici, and Staphylococcus xylosus.

[0110] The engineered E. coli Nissle strain of the disclosure can be provided in an article of manufacture (e.g., in lyophilized form). An article of manufacture also can include one or more pharmaceutically acceptable carriers (e.g., a solvent), and further can include one or more tools for combining and mixing the E. coli with a prebiotic and/or a pharmaceutically acceptable carrier or administering the composition (e.g., a stick or a straw). In addition, an article of manufacture can include one or more other probiotic microorganisms. An article of manufacture also can include appropriate packaging material, and may include written directions or instructions for use (e.g., dosage information) or for administration.

[0111] The following numbered embodiments also form part of the present disclosure:
[0112] 1. An engineered E. coli Nissle strain, or a derivative thereof, having increased transformation efficiency relative to wild type E. coli Nissle.
[0113] 2. The engineered E. coli Nissle strain of embodiment 1, wherein the strain comprises a genome sequence having at least 90%, at least 95%, at least 98%, at least 99%, at least 99.5% at least 99.6% at least 99.7% at least 99.8%, at least 99.9%, or 100% sequence identity to SEQ ID NO: 2.
[0114] 3. The engineered E. coli Nissle strain of embodiment 1 or embodiment 2, wherein the strain comprises one or more of the mutations set forth in Table 5.
[0115] 4. The engineered E. coli Nissle strain of any one of embodiments 1-3, wherein the strain comprises all of the mutations set forth in Table 5.
[0116] 5. The engineered E. coli Nissle strain of any one of embodiments 1-4, wherein a representative sample of the strain has been deposited under ATCC accession number PTA-______.
[0117] 6. The engineered E. coli Nissle strain of any one of embodiments 1-5, wherein the derivative comprises a genome sequence having at least 95%, at least 98%, at least 99%, at least 99.5% at least 99.6% at least 99.7% at least 99.8%, or at least 99.9% sequence identity to SEQ ID NO: 2.
[0118] 7. The engineered E. coli Nissle strain of any one of embodiments 1-6, wherein the derivative comprises all of the mutations set forth in Table 5.
[0119] 8. The engineered E. coli Nissle strain of any one of embodiments 1-7, wherein the derivative further comprises a heterologous polynucleotide.
[0120] 9. The engineered E. coli Nissle strain of any one of embodiments 1-8, wherein the derivative further comprises one or more additional mutations.
[0121] 10. The engineered E. coli Nissle strain of any one of embodiments 1-9, wherein the transformation efficiency is increased at least 2-fold, at least 3-fold, at least 4-fold, at least 5-fold, at least 6-fold, at least 7-fold, at least 8-fold, at least 9-fold, or at least 10-fold relative to the wild type E. coli Nissle strain.
[0122] 11. A probiotic composition comprising the engineered E. coli Nissle strain of any one of embodiments 1-10.
[0123] 12. The probiotic composition of embodiment 11, further comprising a prebiotic.
[0124] 13. The probiotic composition of embodiment 11 or embodiment 12, further comprising pharmaceutically acceptable carrier.
[0125] 14. The probiotic composition of any one of embodiments 11-13, wherein the composition is formulated as a powder, a granule, a tablet, a capsule, a liquid suspension, a paste, or a syrup.
[0126] 15. A method for establishing or maintaining a healthy gastrointestinal microbiota in a subject, the method comprising: administering to the subject the engineered E. coli Nissle strain of any one of embodiments 1-10 or the probiotic composition of any one of embodiments 11-13.
[0127] 16. A method for reducing the effects of a gastrointestinal disorder in a subject, the method comprising: administering to the subject the engineered E. coli Nissle strain of any one of embodiments 1-10 or the probiotic composition of any one of embodiments 11-13.
[0128] 17. A method for preventing or treating a gastrointestinal disorder in a subject, the method comprising: administering to the subject the engineered E. coli Nissle strain of any one of embodiments 1-10 or the probiotic composition of any one of embodiments 11-13.
[0129] 18. The method of embodiment 16 or embodiment 17, wherein the composition is administered orally or rectally.
[0130] 19. The method of any one of embodiments 17-18, wherein the subject is a mammal.
[0131] 20. A method of obtaining an E. coli transformant, comprising transforming a heterologous polynucleotide into the engineered E. coli Nissle strain of any one of embodiments 1-10.
[0132] 21 The method of embodiment 20, wherein the transforming comprises electroporation or heat shock.
[0133] 22. A method of altering a target nucleic acid sequence within an E. coli cell, the method comprising: providing a cell of the engineered E. coli Nissle strain of any one of embodiments 1-10 with a Cas protein, a guide RNA, a donor nucleic acid sequence, and/or a recombinase.
[0134] 23. The method of embodiment 22, wherein the guide RNA and the Cas protein co-localize at the target nucleic acid sequence, the Cas protein cleaves the target nucleic acid sequence, and the donor nucleic acid sequence is inserted into the target nucleic acid sequence.
[0135] 24. The method of embodiment 22 or embodiment 23, wherein the recombinase is a 2-Red recombination system.

[0136] All publications and patent applications mentioned in the specification are indicative of the level of skill of those skilled in the art to which this disclosure pertains. All publications and patent applications are herein incorporated by reference to the same extent as if each individual publication or patent application was specifically and individually indicated to be incorporated by reference.

[0137] Although the foregoing disclosure has been described in some detail by way of illustration and example for purposes of clarity of understanding, it will be obvious that certain changes and modifications may be practiced within the scope of the appended claims.

[0138] The following examples are offered by way of illustration and not by way of limitation.

### EXAMPLES

### Example 1: Adaptive Evolution of E. coli Nissle

[0139] E. coli Nissle was subjected to repeated cycles of electroporation and recovery as schematically represented in FIG. 1A. A 1% inoculum of wild-type EcN was grown up to log phase (OD₆₀₀=0.7) in LB broth at 37° C. The cells were then pelleted using a centrifuge at 1000×g and washed and resuspended in ice-cold water. This was repeated three times to make the cells electrocompetent. 50 μl of these pelleted cells were then mixed with 2 μl of cold plasmid DNA. This mix was pipetted into an electroporation cuvette on ice and left for 20 minutes. The electroporation was carried out using Eppendorf's EPORATOR, H2 ADV PROMO at a potential difference of 1800 V for a set time of five milliseconds and immediately recovered in 950 μl of cold SOC for one hour. The cells were cultured in 5 ml of LB broth overnight at 37° C. This process was repeated several times. A significantly more robust strain was identified at the end of six cycles of electroporation.

### Example 2: Characterization of Engineered Strain of E. coli Nissle

[0140] Characterization assays to find transformation efficiency, motility, hydrophobicity, and growth under various conditions of duress were carried out for the engineered strained and compared to wild type EcN. The wildtype strain and the evolved strain were also competed against each other in LB and minimal media. Experiments were also carried out to study the consumption of iron by both strains. To test whether the engineered strain was more resistant to current shock, or was better at accepting plasmid DNA, transformation efficiencies were calculated for the heat shock method as well.

### Transformation Efficiency

[0141] The wild-type and engineered strains were grown up to log phase (OD₆₀₀=0.7) and then made electrocompetent by repeated washing with ice-cold water. Plasmid DNA was extracted by miniprepping using the QIAGEN miniprep kit and protocol. 50 μl of the pelleted cells and 2 μl of miniprepped plasmid DNA were mixed in an electroporation cuvette on ice. After 10 minutes of resting the cuvette, the mix was electroporated at 1800 V for five milliseconds using Eppendorf's EPORATOR, H2 ADV PROMO. This was then recovered for one hour in cold SOC broth and serially diluted up to 10⁵ and 10⁶ fold. These dilutions were plated in triplicate on LB agar plates having 1% of the appropriate antibiotic of resistance. These plates were incubated overnight at 37° C. The number of distinct cell colonies was counted using ImageJ. These counts were used to calculate the transformation efficiency using Equation (1).

$$Transformation Efficiency = \frac{No . of colonies}{Dilution \times DNA transformed} \qquad Eq ( 1 )$$

[0142] To generalize the trend of transformation efficiency across a variety of plasmids, different origins of replication were used as the exogenous DNA.

[0143] The experiments confirmed the improvement of transformation efficiency in the engineered strain consistently across plasmids of various origins of replication (FIG. 1B). Up to a tenfold increase in the transformation efficiency was demonstrated for transformation by electroporation in the engineered strain. TABLE 1 shows transformation efficiency of plasmids of various origins of replication in wild type and engineered strain.

TABLE 1

| | | | | Transformation | Transformation |
|---|---|---|---|---|---|
| | | Antibiotic of | | Efficiency | Efficiency |
| Plasmid | ORI | Resistance | Copy No. | (wild-type) | (Zapped) |
| pUC19 | pMB1 | Ampicillin | 500-700 | 5.47 × 10⁷ | 6.23 × 10⁸ |
| pAWmNeon | pBR322 | Ampicillin | 15-20 | 1.32 × 10⁶ | 3.54 × 10⁶ |
| pMUT2 | ColE2 | Chloramphenicol | 15-20 | 9.5 × 10⁶ | 6.5 × 10⁷ |
| mScarlet | | | | | |
| pACYC | p15A | Chloramphenicol | 10 | 2.4 × 10⁶ | 9.3 × 10⁶ |

### Motility of Cells

[0144] The motility of cells was measured using an assay first proposed by Adediran et al. (Infect Immun. 2014 February; 82 (2): 670-82). A 0.3% solution of agar in LB broth was prepared and autoclaved. This mixture was poured into plates and set aside for 40 minutes. Meanwhile, the strains whose motility was being measured were grown up to log phase. 2 μl of the inoculum was pipetted just below the surface of the semisolid gel. These plates were incubated at 37° C. for 8 hours. This experiment was done in triplicate, and the area of the cell swarms at the end of 8 hours was measured using ImageJ.

[0145] The engineered strain showed a clear and significant increase in motility compared to the wild-type strain. The wildtype EcN was tagged with mNeon Green, while the Zapped strain was tagged with mScarlet. Motility was studied on semi-solid LB Agar. TABLE 2 shows swarm areas measured using the motility assay across triplicate samples of wild-type and Zapped strains. The area of the swarms proved that the engineered strain grew almost five times faster than the wild-type strain. FIG. 2 shows a representation of growth in the semi-solid agar over 24 hours. This was also seen under the microscope, where the engineered EcN cells seemed to be more motile.

TABLE 2

| | Swarm | Swarm | Swarm | Mean Swarm |
|---|---|---|---|---|
| | Area 1 | Area 2 | Area 3 | Area |
| Wild Type | 2.25 cm² | 2.89 cm² | 3.27 cm² | 2.8 cm² |
| Zapped | 8.23 cm² | 8.16 cm² | 14.93 cm² | 10.44 cm² |

### Growth of the Cells Under Different Conditions

[0146] The two strains were studied under various conditions of duress, including pH, ethanol concentration, bile salt concentrations, temperature, and osmotic pressure.

[0147] To study the growth at various pH levels, cells were grown up to log phase (OD₆₀₀=0.7). A 1% inoculum of these cells in a 96-well plate having LB broth of pH 3, 4, 5, 6, 7 was set up in triplicate. This was put in a plate reader programmed to measure the OD₆₀₀ at an interval of 5 mins for 21 hours. The specific growth constants were calculated using Equation (2).

$$X = {X}_{0} {e}^{μ t} \qquad Eq ( 2 )$$

[0148] Similar 96 well plates were set up for an ethanol growth assay having LB of EtOH concentrations between 2% and 25%. Another 96-well plate was set up for LB having bile salt concentration between 0.01% and 0.21. The effect of osmotic pressure was studied using sucrose concentrations from 2.5% to 10%. The growths in all these media were examined by measuring the OD₆₀₀ every 5 minutes for 21 hours. The specific growth constants were calculated.

[0149] The two strains did not show much difference in growth at 30° C., 37° C., and 42° C. The growth rates in bile salts were also comparable for the two strains. However, engineered strain clearly had a better tolerance to ethanol. The engineered strain tolerated up to 5% EtOH, while wild-type EcN showed stunted growth above 3% EtOH, as shown in FIG. 3A. Below 3%, the growth of both strains was comparable.

[0150] The growth of both strains at various levels of pH is shown in FIG. 3B. It was observed that both strains survived in as low as a pH of 5. Both strains had extremely low growth rates at pH 5 but had comparable growths at pH 6 and 7. The growth assay in sucrose revealed good tolerance for both strains at up to 10% concentration of sucrose, as evident from FIG. 3C. The growth rates in EtOH, pH, and sucrose are summarized in TABLE 3.

TABLE 3

| | Growth Rate of Wildtype EcN | Growth Rate of Zapped |
|---|---|---|
| | (hour⁻¹) | EcN (hour⁻¹) |
| Ethanol 2% | 4.979 × 10⁻³ ± 0.0044 | 3.340 × 10⁻³ ± 0.0027 |
| Ethanol 4% | 4.759 × 10⁻⁴ ± 0.0006 | 4.641 × 10⁻³ ± 0.0041 |
| Ethanol 5% | 5.378 × 10⁻⁵ ± 0.00009 | 2.773 × 10⁻³ ± 0.0025 |
| pH 5 | 3.035 × 10⁻² ± 0.0231 | 3.042 × 10⁻² ± 0.0261 |
| pH 6 | 5.496 × 10⁻² ± 0.0276 | 6.753 × 10⁻² ± 0.0219 |
| PH 7 | 5.316 × 10⁻² ± 0.0314 | 6.989 × 10⁻² ± 0.0249 |
| Sucrose 10% | 4.123 × 10⁻² ± 0.0207 | 4.051 × 10⁻² ± 0.0278 |
| Sucrose 7.5% | 4.527 × 10⁻² ± 0.0179 | 5.069 × 10⁻² ± 0.0278 |
| Sucrose 5% | 5.082 × 10⁻² ± 0.0278 | 5.542 × 10⁻² ± 0.0223 |
| Sucrose 2.5% | 5.534 × 10⁻² ± 0.0289 | 5.966 × 10⁻² ± 0.0213 |

### Hydrophobicity

[0151] Hydrophobicity was measured using a standard partitioning assay. Fresh cultures of both strains were grown till log phase (OD₆₀₀=0.7). The OD was found using Thermo Fischer's NanoDrop^{C}. The OD₅₄₆ of the cell (OD₁) was adjusted to 0.3 using 10 mM CaCO₃ solution. 4 ml of the cell suspension was transferred to individual test tubes having 1 ml of dodecane and vortexed at 2500 rpm for 10 minutes to homogenize the phases. The phases were allowed to separate for 15 minutes. The OD₅₄₆ of the aqueous phase (OD₂) was measured.

[0152] The mean percentage of partitioning was calculated using triplicate samples. A schematic representation of the protocol is shown in FIG. 4. Partitioning of the bacteria suspension is calculated using Equation (3).

$$Percentage of Partitioning = \frac{OD 1 - OD 2}{OD 1} \times 100 \qquad Eq ( 3 )$$

[0153] The assay for membrane hydrophobicity demonstrated significant difference in phase partitioning, as shown in TABLE 4. The data shows that the wild-type strain of EcN is hydrophilic, while the engineered strain is hydrophobic.

TABLE 4

| | Wild-type | | | Zapped | | |
|---|---|---|---|---|---|---|
| OD1 | 0.29 | 0.27 | 0.27 | 0.26 | 0.27 | 0.25 |
| OD2 | 0.14 | 0.17 | 0.14 | 0.12 | 0.12 | 0.11 |
| Percentage of | 51.724 | 37.037 | 48.148 | 53.846 | 55.556 | 56.000 |
| Partitioning | | | | | | |
| Average | 45.636 | | | 55.134 | | |
| Partitioning | | | | | | |

### Plasmid Concentration

[0154] To examine whether the difference was simply in the amount of plasmid that was being made by the two cell lines, the cells were cultured, and plasmids were extracted in biological sextuplets. A nanodrop was then used to find the concentration of DNA in the minipreps. This was repeated for several ORIs and is shown in FIG. 5.

### Competition Assay

[0155] Next, how these two strains compete in the same environment was studied. To compete the two strains, they were transformed with plasmids containing fluorescent markers. The wildtype expressed mNeon Green while the engineered strain expressed mScarlet constitutively. Relative fitness was calculated as per the Malthusian Population Theory. The competition assay revealed the engineered strain as having about 1.1 times the relative fitness of the wildtype strain in both LB and minimal media (FIG. 6A-B).

### Iron Consumption

[0156] An assay to measure consumption of iron in E. coli was first demonstrated by Yeowell et al (Antimicrob Agents Chemother. 1982 December; 22 (6): 961-8). The consumption of iron by the two strains of EcN was compared by finding the lethality, or minimum inhibition concentration of Streptonigrin for both the strains. The MIC was measured in LB with 50 μM Ammonium Ferrous Sulphate. Streptonigrin was dissolved in DMSO. The iron source was 3 μM Ferric Chloride with 1 mM sodium ascorbate. A 96 well plate was set up with LB having streptonigrin in varying concentrations from 0.1 μg/ml to 10 μg/ml. 1% of the iron source was supplemented. A 1% inoculum of the EcN was mixed into the wells and set into the plate reader at 37° C. Readings were taken down at a 10-minute interval. Additionally, growth assays in M63 media and M9 media supplemented with no iron, and 0.4% iron were carried out in similar 96 well plates with similar parameters.

[0157] The growth of the two strains in M9 media was comparable. However, as the amount of Iron increased, the growth of the Zapped strain exceeded the wildtype as shown in FIG. 7.

### Heat Shock Transformation

[0158] A 1% inoculum of wild-type and Zapped EcN were grown up to log phase (OD₆₀₀=0.7) in LB broth at 37° C. These were pelleted in the centrifuge at 10000×g. The cell pellets were washed and resuspended in ice-cold 0.1M CaCl₂) solution. This was followed by centrifugation to pellet the cells again. The washing and spinning down was repeated three times. The final mixture was resuspended in 1 ml of 0.1 CaCl₂) solution and placed on ice for 20 mins. 2 μL of pUC 19 DNA was placed on ice in a centrifuge tube and then mixed gently with 250 μL of the EcN cells. This mixture was left on ice for 30 mins. Then the centrifuge tube was placed in a heat bath at 42° C. for 40 seconds and placed back onto ice for 10 minutes. This was recovered in 250 μL of SOC at 37° C. for an hour and then plated in dilutions.

[0159] The transformation efficiencies were calculated for heat-shock transformation for both the strains using pUC19 as plasmid DNA. There was an average of two-fold increase in the transformation in the Zapped strain (FIG. 8).

### Example 3: Whole Genome Sequencing

[0160] Further to identify the specific mutations that were enabled by the ALE, genome sequencing of the engineered and wild type strain was done. Whole Genome Sequencing of the wild-type and the engineered strain were carried out at Azenta Life Sciences. DNA was extracted from the two strains and PacBio whole genome sequencing was carried out. The isolated DNA was then prepared into a sequencing library by adding hairpin adapters to each end of the DNA fragments. This library was then loaded onto the PacBio instrument. The emitted light signals were recorded. Real-time data collection was followed by base calling and bioinformatics analysis.

[0161] CCS reads were aligned to the provided reference genome using the PacBio software pbmm2 1.2.0. Variants were called using Sentieon 202110.01 (DNAScope algorithm) and normalized (left alignment of INDELs and splitting multiallelic sites into multiple sites) using bcftools 1.13. Variants were then filtered based on allele frequency.

[0162] The sequence assembly was screened for INDEL and SNP variants. A total of 292 variants were identified across the two strains (TABLE 5). This included 144 INDEL variants and 148 SNP variations. Out of these, 69 were high-impact mutations, 90 were of moderate impact, and 14 were of low impact. The rest of the mutations were modifier mutations. FIG. 9A-C shows key results of the sequencing.

[0163] Several mutations were identified in the Carbamate Kinase gene (ArcC). This is known to be a catalyst in carbamoyl phosphate synthesis. Multiple mutations were also seen in the MES transporter. The major facilitator superfamily (MFS) is one of the two largest families of membrane transporters. The CadB gene also showed several mutations. CadB has been known to help with tolerance of E. coli in acidic conditions. The engineered strained showed better tolerance to pH, which may be explained by these mutations in CadB.

[0164] A total of five transcriptional regulators were found to be affected by the mutations including transcriptional regulators in the Fis, TorR, and RhaR Families. Fis is a global transcriptional regulator modulating the expression of over 13% genes in the bacterial genome. Fis, or “factor for inversion stimulation”, is a DNA-binding protein with a primary role in organizing and maintaining nucleoid structure by influencing the production of gyrase and topoisomerase-I. It plays a role in various cellular processes, including transcription, chromosomal replication, DNA inversion, phage integration/excision, and DNA transposition. Furthermore, Fis can create topological barriers, impeding supercoiling diffusion around specific promoters.

[0165] TorR is a transcriptional DNA-binding regulator with both positive and negative roles. It positively regulates genes associated with TMAO induction and tryptophan metabolism while negatively regulating glutamate decarboxylase genes and its own expression. TorR is also involved in anaerobic regulation and plays a part in alkaline and acid stress responses.

[0166] RhaR is yet another transcriptional regulator that featured in the variant analysis. It is an essential part of the RhaBAD regulon, and plays a crucial role in regulating the expression of genes involved in the utilization of rhamnose as a carbon source. RhaR induces RhaS in the presence of rhamnose. RhaR is a member of the AraC family of transcriptional regulators.

TABLE 5

| Position | | | | | |
|---|---|---|---|---|---|
| (relative | | | | | |
| to SEQ | | | | Predicted | |
| ID NO: 1) | Ref | Alt | Type | Impact | Gene |
| 257307 | TG | T | INDEL | HIGH | ECOLIN_01245 |
| 261611 | C | CA | INDEL | MODIFIER | ECOLIN_01235 |
| 287006 | CG | C | INDEL | HIGH | ECOLIN_01465 |
| 313346 | TG | T | INDEL | MODIFIER | ECOLIN_01570 |
| 372997 | AC | A | INDEL | HIGH | ECOLIN_01800 |
| 547536 | TC | T | INDEL | HIGH | ECOLIN_02590 |
| 577005 | CA | C | INDEL | MODIFIER | ECOLIN_02735 |
| 619073 | CT | C | INDEL | HIGH | ECOLIN_02915 |
| 905646 | TC | T | INDEL | HIGH | ECOLIN_04325 |
| 948388 | TC | T | INDEL | MODIFIER | ECOLIN_04550 |
| 1100140 | TC | T | INDEL | MODIFIER | ECOLIN_05190 |
| 1106624 | TG | T | INDEL | HIGH | ECOLIN_05225 |
| 1155295 | CG | C | INDEL | HIGH | ECOLIN_05515 |
| 1155975 | TG | T | INDEL | HIGH | ECOLIN_05515 |
| 1207958 | TG | T | INDEL | MODIFIER | ECOLIN_05765 |
| 1214983 | AG | A | INDEL | HIGH | ECOLIN_05835 |
| 1217272 | AG | A | INDEL | HIGH | ECOLIN_05860 |
| 1330104 | A | ATTC | INDEL | MODERATE | ECOLIN_06500 |
| 1330105 | A | AGTAAACCAC | INDEL | HIGH | ECOLIN_06500 |
| | | (SEQ ID NO: 3) | | | |
| 1431503 | G | T | SNP | MODERATE | ECOLIN_07110 |
| 1511516 | TA | T | INDEL | MODIFIER | ECOLIN_07475 |
| 1559408 | TC | T | INDEL | HIGH | ECOLIN_07715 |
| 1642042 | TG | T | INDEL | HIGH | ECOLIN_08080 |
| 1693592 | G | GT | INDEL | HIGH | ECOLIN_08295 |
| 1738308 | TC | T | INDEL | MODIFIER | ECOLIN_08490 |
| 1775453 | T | TA | INDEL | MODIFIER | ECOLIN_08670 |
| 1797994 | TC | T | INDEL | HIGH | ECOLIN_08785 |
| 1802903 | C | CT | INDEL | MODIFIER | ECOLIN_08815 |
| 1833436 | TC | T | INDEL | HIGH | ECOLIN_09000 |
| 1908015 | C | CA | INDEL | MODIFIER | ECOLIN_09345 |
| 1946344 | TC | T | INDEL | HIGH | ECOLIN_09555 |
| 1954709 | TC | T | INDEL | HIGH | ECOLIN_09600 |
| 1972000 | C | CA | INDEL | MODIFIER | ECOLIN_09660 |
| 2029609 | G | GT | INDEL | HIGH | ECOLIN_09995 |
| 2072645 | G | GT | INDEL | MODIFIER | ECOLIN_10230 |
| 2150037 | CG | C | INDEL | HIGH | ECOLIN_10720 |
| 2180269 | CT | C | INDEL | HIGH | ECOLIN_10880 |
| 2188100 | CT | C | INDEL | HIGH | ECOLIN_10920 |
| 2203779 | TC | T | INDEL | MODIFIER | ECOLIN_10995 |
| 2222419 | TG | T | INDEL | HIGH | ECOLIN_11035 |
| 2231010 | TC | T | INDEL | HIGH | ECOLIN_11065 |
| 2275579 | TG | T | INDEL | HIGH | ECOLIN_11170 |
| 2290073 | AT | A | INDEL | HIGH | ECOLIN_11200 |
| 2338206 | TC | T | INDEL | MODIFIER | ECOLIN_11435 |
| 2343227 | CA | C | INDEL | MODIFIER | ECOLIN_11470 |
| 2370965 | TC | T | INDEL | MODIFIER | ECOLIN_11585 |
| 2469948 | TC | T | INDEL | HIGH | ECOLIN_12000 |
| 2472325 | TC | T | INDEL | HIGH | ECOLIN_12005 |
| 2534241 | TC | T | INDEL | HIGH | ECOLIN_12290 |
| 2673940 | TC | T | INDEL | HIGH | ECOLIN_12890 |
| 2722786 | TC | T | INDEL | MODIFIER | ECOLIN_13120 |
| 2723200 | TC | T | INDEL | MODIFIER | ECOLIN_13120 |
| 2727344 | TC | T | INDEL | MODIFIER | ECOLIN_13135 |
| 2740342 | TC | T | INDEL | HIGH | ECOLIN_13170 |
| 2823249 | TG | T | INDEL | HIGH | ECOLIN_13585 |
| 2825576 | GA | G | INDEL | HIGH | ECOLIN_13590 |
| 2925375 | TC | T | INDEL | HIGH | ECOLIN_13975 |
| 2984481 | C | CA | INDEL | HIGH | ECOLIN_14250 |
| 3091331 | GC | G | INDEL | MODIFIER | ECOLIN_14825 |
| 3109405 | TC | T | INDEL | MODIFIER | ECOLIN_14925 |
| 3131290 | TC | T | INDEL | HIGH | ECOLIN_15025 |
| 3190080 | TC | T | INDEL | HIGH | ECOLIN_15290 |
| 3234031 | TG | T | INDEL | HIGH | ECOLIN_15460 |
| 3290228 | CG | C | INDEL | MODIFIER | ECOLIN_15675 |
| 3318100 | CA | C | INDEL | HIGH | ECOLIN_15840 |
| 3381051 | TC | T | INDEL | HIGH | ECOLIN_16160 |
| 3394188 | TC | T | INDEL | MODIFIER | ECOLIN_16210 |
| 3408230 | C | G | SNP | MODERATE | ECOLIN_16295 |
| 3408232 | G | A | SNP | MODERATE | ECOLIN_16295 |
| 3408236 | G | A | SNP | MODERATE | ECOLIN_16295 |
| 3408254 | C | T | SNP | MODERATE | ECOLIN_16295 |
| 3408260 | C | G | SNP | MODERATE | ECOLIN_16295 |
| 3408264 | A | T | SNP | LOW | ECOLIN_16295 |
| 3408265 | G | C | SNP | MODERATE | ECOLIN_16295 |
| 3408271 | G | A | SNP | MODERATE | ECOLIN_16295 |
| 3408282 | A | C | SNP | LOW | ECOLIN_16295 |
| 3408298 | CACT | C | INDEL | MODERATE | ECOLIN_16295 |
| 3408302 | GGCA | G | INDEL | MODERATE | ECOLIN_16295 |
| 3408310 | C | A | SNP | MODERATE | ECOLIN_16295 |
| 3408312 | ACCACC | A | INDEL | HIGH | ECOLIN_16295 |
| 3408319 | C | G | SNP | MODERATE | ECOLIN_16295 |
| 3408320 | A | AAAAAT | INDEL | HIGH | ECOLIN_16295 |
| 3408324 | C | CTCT | INDEL | MODIFIER | ECOLIN_16300 |
| 3408327 | C | A | SNP | MODIFIER | ECOLIN_16300 |
| 3408332 | A | AGCCT | INDEL | MODIFIER | ECOLIN_16300 |
| 3408334 | C | CTGCTACGGCCTGGTGTTT | INDEL | MODIFIER | ECOLIN_16300 |
| | | (SEQ ID NO: 4) | | | |
| 3408339 | C | CACGCCACTTTTCCATT | INDEL | MODIFIER | ECOLIN_16300 |
| | | (SEQ ID NO: 5) | | | |
| 3408343 | A | ATATCT | INDEL | MODIFIER | ECOLIN_16300 |
| 3408346 | AC | A | INDEL | MODIFIER | ECOLIN_16300 |
| 3408350 | C | T | SNP | MODIFIER | ECOLIN_16300 |
| 3408353 | GTTACA | G | INDEL | MODIFIER | ECOLIN_16300 |
| 3408361 | G | A | SNP | MODIFIER | ECOLIN_16300 |
| 3408363 | A | AT | INDEL | MODIFIER | ECOLIN_16300 |
| 3408367 | A | C | SNP | MODIFIER | ECOLIN_16300 |
| 3408369 | G | GT | INDEL | MODIFIER | ECOLIN_16300 |
| 3408384 | T | C | SNP | MODERATE | ECOLIN_16300 |
| 3408401 | A | C | SNP | LOW | ECOLIN_16300 |
| 3408457 | T | C | SNP | LOW | ECOLIN_16300 |
| 3408468 | T | C | SNP | MODERATE | ECOLIN_16300 |
| 3408471 | C | T | SNP | MODERATE | ECOLIN_16300 |
| 3408480 | A | G | SNP | MODERATE | ECOLIN_16300 |
| 3410228 | G | A | SNP | MODERATE | ECOLIN_16315 |
| 3410238 | A | G | SNP | LOW | ECOLIN_16315 |
| 3410240 | T | C | SNP | MODERATE | ECOLIN_16315 |
| 3410243 | G | A | SNP | HIGH | ECOLIN_16315 |
| 3410249 | C | G | SNP | MODERATE | ECOLIN_16315 |
| 3413110 | TG | T | INDEL | HIGH | ECOLIN_16345 |
| 3451296 | G | GT | INDEL | HIGH | ECOLIN_16530 |
| 3520054 | TC | T | INDEL | HIGH | ECOLIN_16875 |
| 3554413 | CA | C | INDEL | HIGH | ECOLIN_17025 |
| 3604748 | AG | A | INDEL | MODIFIER | ECOLIN_17265 |
| 3640318 | TC | T | INDEL | MODIFIER | ECOLIN_17435 |
| 3764568 | TC | T | INDEL | HIGH | ECOLIN_18045 |
| 3844856 | TC | T | INDEL | HIGH | ECOLIN_18570 |
| 3873401 | CG | C | INDEL | HIGH | ECOLIN_18720 |
| 3888054 | G | T | SNP | MODIFIER | ECOLIN_18785 |
| 4048903 | TC | T | INDEL | HIGH | ECOLIN_19485 |
| 4175223 | AG | A | INDEL | HIGH | ECOLIN_20030 |
| 4208844 | AG | A | INDEL | MODIFIER | ECOLIN_20180 |
| 4208848 | A | G | SNP | MODIFIER | ECOLIN_20180 |
| 4208851 | T | C | SNP | MODIFIER | ECOLIN_20180 |
| 4265268 | CG | C | INDEL | HIGH | ECOLIN_20530 |
| 4341919 | TC | T | INDEL | MODIFIER | ECOLIN_20865 |
| 4383425 | G | GT | INDEL | MODIFIER | ECOLIN_21080 |
| 4404105 | TA | T | INDEL | MODIFIER | ECOLIN_21155 |
| 4463623 | T | TGAGC | INDEL | MODIFIER | ECOLIN_21485 |
| 4463628 | A | AC | INDEL | MODIFIER | ECOLIN_21485 |
| 4463630 | G | GCAT | INDEL | MODIFIER | ECOLIN_21485 |
| 4463634 | A | C | SNP | MODIFIER | ECOLIN_21485 |
| 4463637 | T | G | SNP | MODIFIER | ECOLIN_21485 |
| 4463638 | T | TCGG | INDEL | MODIFIER | ECOLIN_21485 |
| 4463640 | CA | C | INDEL | MODIFIER | ECOLIN_21485 |
| 4463644 | G | C | SNP | MODIFIER | ECOLIN_21485 |
| 4463645 | C | T | SNP | MODIFIER | ECOLIN_21485 |
| 4463650 | A | AAAGTACCTGCATT | INDEL | MODIFIER | ECOLIN_21485 |
| | | (SEQ ID NO: 6) | | | |
| 4463653 | G | GAGA | INDEL | MODIFIER | ECOLIN_21485 |
| 4463655 | T | TCA | INDEL | MODIFIER | ECOLIN_21485 |
| 4463658 | T | TCGGCCAGG | INDEL | MODIFIER | ECOLIN_21485 |
| 4463660 | T | C | SNP | MODIFIER | ECOLIN_21485 |
| 4463664 | GAAAA | G | INDEL | MODIFIER | ECOLIN_21485 |
| 4463678 | A | G | SNP | MODIFIER | ECOLIN_21485 |
| 4463679 | A | AGC | INDEL | MODIFIER | ECOLIN_21485 |
| 4463692 | T | TCCACCATGTTTGAGTTT | INDEL | HIGH | ECOLIN_21485 |
| | | GTTCCGGAAAGTCTTTCC | | | |
| | | GGGTC | | | |
| | | (SEQ ID NO: 7) | | | |
| 4463745 | A | G | SNP | LOW | ECOLIN_21485 |
| 4463757 | G | A | SNP | LOW | ECOLIN_21485 |
| 4609507 | A | ACCGTGTACGTACAAGCA | INDEL | MODIFIER | ECOLIN_22180 |
| | | GTGGGAGCCTCTTAATGG | | | |
| | | GGTGACTGCGTACCTTTT | | | |
| | | GTATAATGGGTCAGCGAC | | | |
| | | TTATATTCTGTAGCAAGG | | | |
| | | TTAACCGAATAGGGGAGC | | | |
| | | CGAAGGGAAACCGAGTCT | | | |
| | | TAACTGGGCGTTAAGTTG | | | |
| | | CAGGGTATAGACCCGAAA | | | |
| | | CCCGGTGATCTAGCCATG | | | |
| | | GGCAGGTTGAAGGTTGGG | | | |
| | | TAACACTAACTGGAGGAC | | | |
| | | CGAACCGACTAATGTTGA | | | |
| | | AAAATTAGCGGATGACTT | | | |
| | | GTGGCTGGGGGTGAAAGG | | | |
| | | CCAATCAAACCGGGAGAT | | | |
| | | AGCTGGTTCTCCCCGAAA | | | |
| | | GCTATTTAGGTAGCGCCT | | | |
| | | CGTGAATTCATCTCCGGG | | | |
| | | GGTAGAGCACTGTTTCGG | | | |
| | | CAAGGGGGTCATCCCGAC | | | |
| | | TTACCAACCCGATGCAAA | | | |
| | | CTGCGAATACCGGAGAAT | | | |
| | | GTTATCACGGGAGACACA | | | |
| | | CGGCGGGTGCTAACGTCC | | | |
| | | GTCGTGAAGAGGGAAACA | | | |
| | | ACCCAGACCGCCAGCTAA | | | |
| | | GGTCCCAAAGTCATGGTT | | | |
| | | AAGTGGGAAACGATGTGG | | | |
| | | GAAGGCCCAGACAGCCAG | | | |
| | | GATGTTGGCTTAGAAGCA | | | |
| | | GCCATCATTTAAAGAAAG | | | |
| | | CGTAATAGCTCACTGGTC | | | |
| | | GAGTCGGCCTGCGCGGAA | | | |
| | | GATGTAACGGGGCTAAAC | | | |
| | | CATGCACCGAAGCTGCGG | | | |
| | | CAGCGACACTATGTGTTG | | | |
| | | TTGGGTAGGGGAGCGTTC | | | |
| | | TGTAAGCCTGTGAAGGTG | | | |
| | | GCCTGTGAGGGTTGCTGG | | | |
| | | AGGTATCAGAAGTGCGAA | | | |
| | | TGCTGACATAAGTAACGA | | | |
| | | TAAAGCGGGTGAAAAGCC | | | |
| | | CGCTCGCCGGAAGACCAA | | | |
| | | GGGTTCCTGTCCAACGTT | | | |
| | | AATCGGGGCAGGGTGAGT | | | |
| | | CGACCCCTAAGGCGAGGC | | | |
| | | CGAAAGGCGTAGTCGATG | | | |
| | | GGAAACAGGTTAATATTC | | | |
| | | CTGTACTTGGTGTTACTG | | | |
| | | CGAAGGGGGGACGGAGAA | | | |
| | | GGCTATGTTGGCCGGGCG | | | |
| | | ACGGTTGTCCCGGTTTAA | | | |
| | | GCGTGTAGGCTGGTTTTC | | | |
| | | CAGGCAAATCCGGAAAAC | | | |
| | | CAAGGCTGAGGCGTGATG | | | |
| | | ACGAGGCACTACGGTGCT | | | |
| | | GAAGCGACAAATGCCCTG | | | |
| | | CTTCCAGGAAAAGCCTCT | | | |
| | | AAGCATCAGGTAACATCA | | | |
| | | AATCGTACCCCAAACCGA | | | |
| | | CACAGGTGGTCAGGTAGA | | | |
| | | GAATACCAAGGCGCTTGA | | | |
| | | GAGAACTCGGGTGAAGGA | | | |
| | | ACTAGGCAAAATGGTGCC | | | |
| | | GTAACTTCGGGAGAAGGC | | | |
| | | ACGCTGATATGTAGGTGA | | | |
| | | AGCGACTTGCTCGTGGAG | | | |
| | | CTGAAATCAGTCGAAGAT | | | |
| | | ACCAGCTGGCTGCAACTG | | | |
| | | TTTATTAAAAACACAGCA | | | |
| | | CTGTGCAAACACGAAAGT | | | |
| | | GGACGTATACGGTGTGAC | | | |
| | | GCCTGCCCGGTGCCGGAA | | | |
| | | GGTTAATTGATGGGGTTA | | | |
| | | GCGGTAACGCGAAGCTCT | | | |
| | | TGATCGAAGCCCCGGTAA | | | |
| | | ACGGCGGCCGTAACTATA | | | |
| | | ACGGTCCTAAGGTAGCGA | | | |
| | | AATTCCTTGTCGGGTAAG | | | |
| | | TTCCGACCTGCACGAATG | | | |
| | | GCGTAATGATGGCCAGGC | | | |
| | | TGTCTCCACCCGAGACTC | | | |
| | | AGTGAAATTGAACTCGCT | | | |
| | | GTGAAGATGCAGTGTACC | | | |
| | | CGCGGCAAGACGGAAAGA | | | |
| | | CCCCGTGAACCTTTACTA | | | |
| | | TAGCTTGACACTGAACAT | | | |
| | | TGAGCCTTGATGTGTAGG | | | |
| | | ATAGGTGGGAGGCTTTGA | | | |
| | | AGTGTGGACGCCAGTCTG | | | |
| | | CATGGAGCCGACCTTGAA | | | |
| | | ATACCACCCTTTAATGTT | | | |
| | | TGATGTTCTAACGTTGGC | | | |
| | | CCGTAATCCGGGTTGCGG | | | |
| | | ACAGTGTCTGGTGGGTAG | | | |
| | | TTTGACTGGGGCGGTCTC | | | |
| | | CTCCTAAAGAGTAACGGA | | | |
| | | GGAGCACGAAGGTTGGCT | | | |
| | | AATCCTGGTCGGACATCA | | | |
| | | GGAGGTTAGTGCAATGGC | | | |
| | | ATAAGCCAGCTTGACTGC | | | |
| | | GAGCGTGACGGCGCGAGC | | | |
| | | AGGTGCGAAAGCAGGTCA | | | |
| | | TAGTGATCCGGTGGTTCT | | | |
| | | GAATGGAAGGGCCATCGC | | | |
| | | TCAACGGATAAAAGGTAC | | | |
| | | TCCGGGGATAACAGGCTG | | | |
| | | ATACCGCCCAAGAGTTCA | | | |
| | | TATCGACGGCGGTGTTTG | | | |
| | | GCACCTCGATGTCGGCTC | | | |
| | | ATCACATCCTGGGGCTGA | | | |
| | | AGTAGGTCCCAAGGGTAT | | | |
| | | GGCTGTTCGCCATTTAAA | | | |
| | | GTGGTACGCGAGCTGGGT | | | |
| | | TTAGAACGT | | | |
| | | (SEQ ID NO: 8) | | | |
| 4610114 | TC | T | INDEL | MODIFIER | ECOLIN_22185 |
| 4649091 | TC | T | INDEL | MODIFIER | ECOLIN_22350 |
| 4709868 | C | CA | INDEL | HIGH | ECOLIN_22645 |
| 4729061 | TC | T | INDEL | MODIFIER | ECOLIN_22710 |
| 4753558 | TG | T | INDEL | HIGH | ECOLIN_22830 |
| 4756638 | C | T | SNP | MODIFIER | ECOLIN_22825 |
| 4826691 | G | A | SNP | MODIFIER | ECOLIN_23160 |
| 4826713 | A | T | SNP | MODIFIER | ECOLIN_23160 |
| 4826728 | G | T | SNP | MODIFIER | ECOLIN_23160 |
| 4826746 | C | T | SNP | MODIFIER | ECOLIN_23160 |
| 4826749 | T | C | SNP | MODIFIER | ECOLIN_23160 |
| 4826752 | T | C | SNP | MODIFIER | ECOLIN_23160 |
| 4827732 | AGT | A | INDEL | MODIFIER | ECOLIN_23165 |
| 4827736 | T | TCG | INDEL | MODIFIER | ECOLIN_23165 |
| 4827746 | G | T | SNP | MODIFIER | ECOLIN_23165 |
| 4827747 | A | C | SNP | MODIFIER | ECOLIN_23165 |
| 4827750 | T | C | SNP | MODIFIER | ECOLIN_23165 |
| 4827753 | C | T | SNP | MODIFIER | ECOLIN_23165 |
| 4827763 | G | A | SNP | MODIFIER | ECOLIN_23165 |
| 4827766 | G | A | SNP | MODIFIER | ECOLIN_23165 |
| 4827770 | C | T | SNP | MODIFIER | ECOLIN_23165 |
| 4827772 | G | A | SNP | MODIFIER | ECOLIN_23165 |
| 4827774 | A | T | SNP | MODIFIER | ECOLIN_23165 |
| 4827776 | A | T | SNP | MODIFIER | ECOLIN_23165 |
| 4827778 | G | GGCGC | INDEL | MODIFIER | ECOLIN_23165 |
| 4889725 | TG | T | INDEL | MODIFIER | ECOLIN_23560 |
| 4902377 | TC | T | INDEL | HIGH | ECOLIN_23655 |
| 4976107 | TC | T | INDEL | HIGH | ECOLIN_23965 |
| 5000528 | G | GT | INDEL | MODIFIER | ECOLIN_24070 |
| 5010102 | TC | T | INDEL | HIGH | ECOLIN_24140 |
| 5041738 | CA | C | INDEL | HIGH | ECOLIN_24275 |
| 5068216 | TC | T | INDEL | MODIFIER | ECOLIN_24410 |
| 5077148 | TC | T | INDEL | MODIFIER | ECOLIN_24460 |
| 5080926 | T | C | SNP | MODIFIER | ECOLIN_24475 |
| 5113156 | CA | C | INDEL | MODIFIER | ECOLIN_24655 |
| 5125848 | T | C | SNP | MODIFIER | ECOLIN_24715 |
| 5153839 | A | G | SNP | MODIFIER | ECOLIN_24845 |
| 5153866 | G | A | SNP | MODIFIER | ECOLIN_24845 |
| 5153890 | A | T | SNP | MODIFIER | ECOLIN_24845 |
| 5163940 | CG | C | INDEL | MODIFIER | ECOLIN_24895 |
| 5191207 | G | T | SNP | MODIFIER | ECOLIN_25060 |
| 5249790 | T | C | SNP | MODERATE | ECOLIN_25390 |
| 5249835 | T | C | SNP | MODERATE | ECOLIN_25390 |
| 5249841 | G | T | SNP | MODERATE | ECOLIN_25390 |
| 5249844 | G | A | SNP | MODERATE | ECOLIN_25390 |
| 5249853 | A | G | SNP | MODERATE | ECOLIN_25390 |
| 5249856 | C | G | SNP | MODERATE | ECOLIN_25390 |
| 5249862 | C | G | SNP | MODERATE | ECOLIN_25390 |
| 5249877 | A | G | SNP | MODERATE | ECOLIN_25390 |
| 5249881 | C | T | SNP | LOW | ECOLIN_25390 |
| 5249886 | T | A | SNP | MODERATE | ECOLIN_25390 |
| 5249889 | C | G | SNP | MODERATE | ECOLIN_25390 |
| 5249892 | T | C | SNP | MODERATE | ECOLIN_25390 |
| 5249896 | G | A | SNP | LOW | ECOLIN_25390 |
| 5249910 | C | G | SNP | MODERATE | ECOLIN_25390 |
| 5249916 | C | T | SNP | MODERATE | ECOLIN_25390 |
| 5249931 | C | G | SNP | MODERATE | ECOLIN_25390 |
| 5249941 | T | C | SNP | LOW | ECOLIN_25390 |
| 5249943 | A | C | SNP | MODERATE | ECOLIN_25390 |
| 5249946 | C | A | SNP | MODERATE | ECOLIN_25390 |
| 5249949 | C | T | SNP | MODERATE | ECOLIN_25390 |
| 5249955 | G | A | SNP | MODERATE | ECOLIN_25390 |
| 5249958 | T | C | SNP | MODERATE | ECOLIN_25390 |
| 5249961 | C | G | SNP | MODERATE | ECOLIN_25390 |
| 5249970 | C | T | SNP | MODERATE | ECOLIN_25390 |
| 5249977 | C | T | SNP | LOW | ECOLIN_25390 |
| 5249981 | C | CG | INDEL | HIGH | ECOLIN_25390 |
| 5249984 | TA | T | INDEL | HIGH | ECOLIN_25390 |
| 5249988 | G | C | SNP | MODERATE | ECOLIN_25390 |
| 5249997 | G | A | SNP | MODERATE | ECOLIN_25390 |
| 5250003 | T | C | SNP | MODERATE | ECOLIN_25390 |
| 5250006 | G | C | SNP | MODERATE | ECOLIN_25390 |
| 5250009 | G | C | SNP | MODERATE | ECOLIN_25390 |
| 5250018 | A | G | SNP | MODERATE | ECOLIN_25390 |
| 5250021 | T | G | SNP | MODERATE | ECOLIN_25390 |
| 5250027 | T | C | SNP | MODERATE | ECOLIN_25390 |
| 5250034 | C | T | SNP | LOW | ECOLIN_25390 |
| 5250042 | G | A | SNP | MODERATE | ECOLIN_25390 |
| 5250402 | C | T | SNP | MODERATE | ECOLIN_25390 |
| 5250405 | C | T | SNP | MODERATE | ECOLIN_25390 |
| 5250417 | T | C | SNP | MODERATE | ECOLIN_25390 |
| 5250420 | C | G | SNP | MODERATE | ECOLIN_25390 |
| 5250424 | C | T | SNP | LOW | ECOLIN_25390 |
| 5250426 | A | G | SNP | MODERATE | ECOLIN_25390 |
| 5250432 | T | A | SNP | MODERATE | ECOLIN_25390 |
| 5250434 | G | A | SNP | MODERATE | ECOLIN_25390 |
| 5250435 | C | G | SNP | MODERATE | ECOLIN_25390 |
| 5250438 | A | G | SNP | MODERATE | ECOLIN_25390 |
| 5250441 | T | C | SNP | MODERATE | ECOLIN_25390 |
| 5250443 | A | G | SNP | MODERATE | ECOLIN_25390 |
| 5250468 | T | C | SNP | MODERATE | ECOLIN_25390 |
| 5250477 | A | G | SNP | MODERATE | ECOLIN_25390 |
| 5250478 | A | C | SNP | MODERATE | ECOLIN_25390 |
| 5250480 | A | G | SNP | MODERATE | ECOLIN_25390 |
| 5250483 | G | C | SNP | MODERATE | ECOLIN_25390 |
| 5250492 | C | T | SNP | MODERATE | ECOLIN_25390 |
| 5250504 | G | T | SNP | MODERATE | ECOLIN_25390 |
| 5250505 | C | A | SNP | LOW | ECOLIN_25390 |
| 5250507 | G | C | SNP | MODERATE | ECOLIN_25390 |
| 5250522 | T | TA | INDEL | HIGH | ECOLIN_25390 |
| 5250524 | GC | G | INDEL | HIGH | ECOLIN_25390 |
| 5250528 | A | G | SNP | HIGH | ECOLIN_25390 |
| 5250532 | A | G | SNP | MODERATE | ECOLIN_25390 |
| 5250534 | T | C | SNP | MODERATE | ECOLIN_25390 |
| 5250540 | C | G | SNP | MODERATE | ECOLIN_25390 |
| 5250549 | C | T | SNP | MODERATE | ECOLIN_25390 |
| 5250552 | T | C | SNP | MODERATE | ECOLIN_25390 |
| 5250561 | A | G | SNP | MODERATE | ECOLIN_25390 |
| 5250564 | G | A | SNP | MODERATE | ECOLIN_25390 |
| 5250573 | A | G | SNP | MODERATE | ECOLIN_25390 |
| 5250576 | T | G | SNP | MODERATE | ECOLIN_25390 |
| 5304113 | G | A | SNP | MODERATE | ECOLIN_25740 |
| 5304115 | A | G | SNP | MODERATE | ECOLIN_25740 |
| 5304118 | G | A | SNP | MODERATE | ECOLIN_25740 |
| 5304124 | T | C | SNP | MODERATE | ECOLIN_25740 |
| 5304250 | A | C | SNP | MODERATE | ECOLIN_25740 |
| 5332501 | CA | C | INDEL | MODIFIER | ECOLIN_25870 |
| 5345202 | T | C | SNP | MODIFIER | ECOLIN_25925 |
| 5345207 | A | G | SNP | MODIFIER | ECOLIN_25925 |
| 5345240 | C | G | SNP | MODIFIER | ECOLIN_25925 |
| 5345241 | TC | T | INDEL | MODIFIER | ECOLIN_25925 |
| 5345243 | A | T | SNP | MODIFIER | ECOLIN_25925 |
| 5345245 | G | GA | INDEL | MODIFIER | ECOLIN_25925 |
| 5345258 | A | AC | INDEL | MODIFIER | ECOLIN_25925 |
| 5345263 | CT | C | INDEL | MODIFIER | ECOLIN_25925 |
| 5345273 | A | G | SNP | MODIFIER | ECOLIN_25925 |
| 5345280 | CCG | C | INDEL | MODIFIER | ECOLIN_25925 |
| 5345284 | G | C | SNP | MODIFIER | ECOLIN_25925 |
| 5345285 | G | GAC | INDEL | MODIFIER | ECOLIN_25925 |
| 5345294 | A | G | SNP | MODIFIER | ECOLIN_25925 |
| 5346922 | TG | T | INDEL | MODIFIER | ECOLIN_25930 |
| 5374165 | G | T | SNP | LOW | ECOLIN_26080 |
| 5374166 | G | A | SNP | MODERATE | ECOLIN_26080 |
| 5374167 | C | A | SNP | MODERATE | ECOLIN_26080 |
| 5374172 | A | AG | INDEL | HIGH | ECOLIN_26080 |
| 5374175 | TC | T | INDEL | HIGH | ECOLIN_26080 |
| 5374184 | G | A | SNP | MODERATE | ECOLIN_26080 |
| 5374190 | A | C | SNP | MODERATE | ECOLIN_26080 |
| 5374195 | C | G | SNP | MODERATE | ECOLIN_26080 |
| 5374199 | A | T | SNP | MODERATE | ECOLIN_26080 |
| 5374202 | G | A | SNP | MODERATE | ECOLIN_26080 |
| 5374203 | T | A | SNP | MODERATE | ECOLIN_26080 |
| 5376958 | TG | T | INDEL | MODIFIER | ECOLIN_26075 |
| 5428111 | AC | A | INDEL | MODIFIER | ECOLIN_26325 |
| 5430346 | G | GTGCGTTTGCAGCAC | INDEL | MODIFIER | ECOLIN_26350 |
| | | (SEQ ID NO: 9) | | | |

### Discussion of Examples 1-3

[0167] An improved strain of E. coli Nissle was successfully engineered through adaptive laboratory evolution (ALE). The extensive characterization, including functional tests and genomic analysis, demonstrated the enhanced robustness of the engineered strain compared to the wildtype counterpart. These findings represent a significant step forward in harnessing the potential of E. coli Nissle for various applications, including biotechnology and therapeutic use.

[0168] These results underscore the efficacy of ALE as a powerful tool for enhancing microbial strains. By subjecting E. coli Nissle to a controlled evolutionary process, a strain that exhibits improved functionality under specific conditions was achieved. This success opens new avenues for tailoring bacterial strains to meet specific performance criteria.

[0169] The genomic analysis provided valuable insights into the genetic changes that underlie the improved performance of the engineered strain. This information can serve as a foundation for future research into the genetic determinants of robustness in E. coli Nissle and other microbial systems. Future research can also explore specific mutations and find what effect they have on the robustness of the cell.

### Example 4: CRISPR-Assisted Recombineering

[0170] CRISPR-aided recombineering works on the premise that since recombineering (generating mutations) is overall not a very efficient process, it can be aided by killing cells (via targeted double-stranded break) that have not obtained the mutation. Overall recombineering efficiency using CRISPR-Cas9, i.e., the ratio of transformed colonies that possess the mutation of interest, is a function of several factors, including transformation efficiency of the plasmid and insert, annealing of the homology arms, resistance to nucleases in the cell, induction of the λ-Red genes, and CRISPR killing efficiency. These experiments are designed to see if the overall recombineering efficiency is increased in the Zapped strain and to understand the possible mechanisms. The relevant parts used in these experiments are described in TABLE 5.

TABLE 5

| | |
|---|---|
| pCas9 | The plasmid encoding Cas9 (constitutive) and the λ-Red recombineering |
| | proteins (arabinose-inducible). This is pre-transformed into WT and |
| | Zapped before the start of the experiments. |
| pTargetF-mgsA | The plasmid encoding a guide RNA with an N20 corresponding to the |
| | mgsA gene in EcN. A “dummy” pTargetF plasmid contains an N20 not |
| | present in the EcN genome and therefore should not contribute to |
| | CRISPR-aided killing. |
| Insert | A double-stranded DNA cassette including a constitutive promoter, the |
| | GFP gene, and 500 bp homology arms on the 5′ and 3′ ends that |
| | correspond to the regions flanking the mgsA gene. |

[0171] During transformation, the insert, pTargetF, or both are electroporated and cells are plated on relevant antibiotics followed by colony counting. Cells that are fluorescent have the GFP cassette integrated into the genome, presumably at the mgsA site.

Overall Recombineering Efficiency—pTargetF mgsA with GFP Insert

[0172] The number of fluorescent colonies is compared in the wildtype and Zapped strains. Fluorescent colonies indicate successful homologous recombination facilitated by the fluorescent protein gene insert. The Zapped strain is expected to produce a significantly higher number of fluorescent colonies than the wildtype. This indicates greater recombineering efficiency, likely due to enhanced transformation efficiency, improved survival on electroporation, or a more efficient DNA repair system.

CRISPR Killing Efficiency—pTargetF mgsA without Insert

[0173] Without an insert, there should be no fluorescent colonies. Since bacteria typically lack non-homologous end joining (NHEJ) mechanisms, any transformants represent “escapers”-cells that survive CRISPR-based genome cutting. It is possible that the Zapped strain may exhibit a higher number of escapers because of its resilience to electroporation. However, since this condition measures survival post-CRISPR cutting without template-directed repair, the number of colonies may differ only slightly, and statistically insignificantly between wildtype and Zapped.

A Red Recombineering Efficiency—pTargetF Dummy with Insert

[0174] The outcomes for a dummy transformation with the fluorescent protein insert are compared in the wildtype and Zapped strains. Since the dummy pTargetF lacks a genomic target, no double-strand breaks should occur, and no CRISPR killing would occur. Fluorescent colonies would appear proportional to the rate of recombination. Both wildtype and Zapped are expected to have a small number (on the order of 1 in 10,000) fluorescent cells. However, the increased transformation efficiency of Zapped may allow more of the insert to enter the cell, which may increase the number of successful transformants.

Successful Plasmid Take-Up—pTargetF Dummy without Insert

[0175] This condition measures the baseline transformation efficiency by counting all colonies after transformation. Since there is no genomic target or fluorescent insert, all surviving colonies reflect successful plasmid uptake. The Zapped strain is expected to show a higher number of total transformants than the wildtype due to its higher transformation efficiency and robustness under identical experimental conditions.

### Calculation of Recombineering Efficiency

[0176] Recombineering efficiency will be calculated as:

$$Recombineering Efficiency = \frac{Number of recombinants ( fluorescent colonies from Target + Insert )}{Total cells plated ( colonies from pTargetF dummy without insert )}$$

### Escapers Comparison

[0177] The experiments will also help quantify “escapers”—colonies that survive CRISPR cutting without undergoing HDR. Escapers will be identified in conditions involving pTargetF-mgsA without an insert and dummy plasmids with inserts.

### Overall Expectations

[0178] Higher recombineering efficiency in Zapped: Zapped is expected to show a higher ratio of recombinants to total plated cells compared to wildtype due to increased transformation and recombineering efficiency.

[0179] Comparable escaper rates: Both strains are expected to have similar numbers of escapers, with the possibility of more survivors in the Zapped, but a higher overall efficiency. Non-homologous repair systems are expected to be similar in both strains.

### REFERENCES

[0180] Abil, Z., Ellefson, J. W., Gollihar, J. D., Watkins, E. & Ellington, A. D. Compartmentalized partnered replication for the directed evolution of genetic parts and circuits. Nat. Protoc. 12, 2493-2512 (2017).
[0181] Adediran, J. et al. An Escherichia coli Nissle 1917 Missense Mutant Colonizes the Streptomycin-Treated Mouse Intestine Better than the Wild Type but Is Not a Better Probiotic. Infect. Immun. 82, 670-682 (2014).
[0182] Ahmad, A. F., Dwivedi, G., O'Gara, F., Caparros-Martin, J., & Ward, N. C. The gut microbiome and cardiovascular disease: current knowledge and clinical potential. Am J Physiol Heart Circ Physiol. 317, H923-H938 (2019).
[0183] Bennett, A. F., Dao, K. M. & Lenski, R. E. Rapid evolution in response to high-temperature selection. Nature 346, 79-81 (1990).
[0184] Bordi, C., Théraulaz, L., Méjean, V. & Jourlin-Castelli, C. Anticipating an alkaline stress through the Tor phosphorelay system in Escherichia coli. Mol. Microbiol. 48, 211-223 (2003).
[0185] Bull, M. J. & Plummer, N. T. Part 1: The Human Gut Microbiome in Health and Disease. Integr. Med. Clin. J. 13, 17-22 (2014).
[0186] Dages, S., Zhi, X. & Leng, F. Fis protein forms DNA topological barriers to confine transcription-coupled DNA supercoiling in Escherichia coli. FEBS Lett. 594, 791-798 (2020).
[0187] Egan, S. M. & Schleif, R. F. A regulatory cascade in the induction of rhaBAD. J. Mol. Biol. 234, 87-98 (1993).
[0188] Elena, S. F. & Lenski, R. E. Evolution experiments with microorganisms: the dynamics and genetic bases of adaptation. Nat. Rev. Genet. 4, 457-469 (2003).
[0189] Evans, J., Morris, L. & Marchesi, J. The gut microbiome: The role of a virtual organ in the endocrinology of the host. J. Endocrinol. 218, (2013).
[0190] Galland, L. The Gut Microbiome and the Brain. J. Med. Food 17, 1261-1272 (2014).
[0191] Gibson, G. R. & Roberfroid, M. B. Dietary Modulation of the Human Colonic Microbiota: Introducing the Concept of Prebiotics. J. Nutr. 125, 1401-1412 (1995).
[0192] Gill, A. O. & Holley, R. A. Inhibition of membrane bound ATPases of Escherichia coli and Listeria monocytogenes by plant oil aromatics. Int. J. Food Microbiol. 111, 170-174 (2006).
[0193] Hancock, V., Dahl, M., & Klemm, P. Probiotic Escherichia coli strain Nissle 1917 outcompetes intestinal pathogens during biofilm formation. J Med Microbiol. 59, 392-399 (2010).
[0194] Kan, A., Gelfat, I., Emani, S., Praveschotinunt, P. & Joshi, N. S. Plasmid Vectors for in Vivo Selection-Free Use with the Probiotic E. coli Nissle 1917. ACS Synth. Biol. 10, 94-106 (2021).
[0195] Kim, K. et al. Adaptive laboratory evolution of Escherichia coli W enhances gamma-aminobutyric acid production using glycerol as the carbon source. Metab. Eng. 69, 59-72 (2022).
[0196] Lee, D.-H. & Palsson, B. Ø. Adaptive evolution of Escherichia coli K-12 MG1655 during growth on a Nonnative carbon source, L-1,2-propanediol. Appl. Environ. Microbiol. 76, 4158-4168 (2010).
[0197] Long, C. P., Gonzalez, J. E., Feist, A. M., Palsson, B. O. & Antoniewicz, M. R. Fast growth phenotype of E. coli K-12 from adaptive laboratory evolution does not require intracellular flux rewiring. Metab. Eng. 44, 100-107 (2017).
[0198] Lv, M. et al. Fis is a global regulator critical for modulation of virulence factor production and pathogenicity of Dickeya zeae. Sci. Rep. 8, 341 (2018).
[0199] Matson, M. M. et al. Adaptive laboratory evolution for improved tolerance of isobutyl acetate in Escherichia coli. Metab. Eng. 69, 50-58 (2022).
[0200] Nie, P., Li, Z., Wang, Y., Zhang, Y., Zhao, M., Luo, J., Du, S., Deng, Z., Chen, J., Wang, Y., Chen, S., & Wang, L. Gut microbiome interventions in human health and diseases. Med Res Rev. 39, 2286-231 (2019).
[0201] O'Toole, P. W., Marchesi, J. R. & Hill, C. Next-generation probiotics: the spectrum from probiotics to live biotherapeutics. Nat. Microbiol. 2, 17057 (2017).
[0202] Ou, B. et al. Genetic engineering of probiotic Escherichia coli Nissle 1917 for clinical application. Appl. Microbiol. Biotechnol. 100, 8693-8699 (2016).
[0203] Pandey, Kavita. R., Naik, Suresh. R. & Vakil, Babu. V. Probiotics, prebiotics and synbiotics—a review. J. Food Sci. Technol. 52, 7577-7587 (2015).
[0204] Raeside, C. et al. Large Chromosomal Rearrangements during a Long-Term Evolution Experiment with Escherichia coli. mBio 5, 10.1128/mbio.01377-14 (2014).
[0205] Rosenberg, S. M., Thulin, C. & Harris, R. S. Transient and Heritable Mutators in Adaptive Evolution in the Lab and in Nature. Genetics 148, 1559-1566 (1998).
[0206] Rothstein S. M., Sen S, Mansell T. J. Towards high-throughput genome engineering in lactic acid bacteria. Curr Opin Biotechnol. 61, 181-188 (2020).
[0207] Sandberg, T. E., Salazar, M. J., Weng, L. L., Palsson, B. O. & Feist, A. M. The emergence of adaptive laboratory evolution as an efficient tool for biological discovery and industrial biotechnology. Metab. Eng. 56, 1-16 (2019).
[0208] Schleif, R. AraC protein: A love-hate relationship. BioEssays 25, 274-282 (2003).
[0209] Schneider, R. et al. An architectural role of the Escherichia coli chromatin protein FIS in organising DNA. Nucleic Acids Res. 29, 5107-5114 (2001).
[0210] Sekirov, I., Russell, S. L., Antunes, L. C. M. & Finlay, B. B. Gut Microbiota in Health and Disease. Physiol. Rev. 90, 859-904 (2010).
[0211] Simon, G., Méjean, V., Jourlin, C., Chippaux, M. & Pascal, M. C. The torR gene of Escherichia coli encodes a response regulator protein involved in the expression of the trimethylamine N-oxide reductase genes. J. Bacteriol. 176, 5601-5606 (1994).
[0212] Sonnenborn, U. 100 years of E. coli strain Nissle 1917. OUPblog blog.oup.com/2017/04/e-coli-strain-nissle-1917-timeline/(2017).
[0213] Ting, W.-W. & Ng, I.-S. Adaptive laboratory evolution and metabolic regulation of genetic Escherichia coli W3110 toward low-carbon footprint production of 5-aminolevulinic acid. J. Taiwan Inst. Chem. Eng. 141, 104612 (2022).
[0214] Tobin, J. F. & Schleif, R. F. Positive regulation of the Escherichia coli L-rhamnose operon is mediated by the products of tandemly repeated regulatory genes. J. Mol. Biol. 196, 789-799 (1987).
[0215] Tobin, J. F. & Schleif, R. F. Purification and properties of RhaR, the positive regulator of the 1-rhamnose operons of Escherichia coli. J. Mol. Biol. 211, 75-89 (1990).
[0216] Wang, H. H. et al. Programming cells by multiplex genome engineering and accelerated evolution. Nature 460, 894-898 (2009).
[0217] Weinstein-Fischer, D. & Altuvia, S. Differential regulation of Escherichia coli topoisomerase I by Fis. Mol. Microbiol. 63, 1131-1144 (2007).
[0218] Wielgoss, S. et al. Mutation Rate Inferred From Synonymous Substitutions in a Long-Term Evolution Experiment With Escherichia coli. G3 GenesGenomesGenetics 1, 183-186 (2011).
[0219] Xu, J., Zhou, L., Yin, M. & Zhou, Z. Novel Mode Engineering for β-Alanine Production in Escherichia coli with the Guide of Adaptive Laboratory Evolution. Microorganisms 9, 600 (2021).
[0220] Yeowell, H. N. & White, J. R. Iron requirement in the bactericidal mechanism of streptonigrin. Antimicrob. Agents Chemother. 22, 961-968 (1982).
[0221] Zainuddin, H. S., Bai, Y. & Mansell, T. J. CRISPR-based curing and analysis of metabolic burden of cryptic plasmids in Escherichia coli Nissle 1917. Eng. Life Sci. 19, 478-485 (2019).

The application's sequence listing, which the Patent Office published only in electronic form, follows.

SEQUENCE LISTING (9 sequences)

SEQ ID NO: 1 - DNA, 5441200 bp, Escherichia coli (residues 1-1,813,734 of 5,441,200)
  source 1..5441200: mol_type = genomic DNA
agcttttcattctgactgcaacgggcaatatgtctctgtgtggattaaaaaaagagtgtctgatagcagcttctgaactggttacctgccgtgagtaaattaaaattttattgacttaggtcactaaatactttaaccaatataggcatagcgcacagacagataaaaattacagagtacacaacatccatgaaacgcattagcaccaccattaccaccaccatcaccattaccacaggtaacggtgcgggctgacgcgtacaggaaacacagaaaaaagcccgcacctgacagtgcgggcttttttttcgccaaaatcgccaaaattttttttcgaccaaaggtaacgaggtaacaaccatgcgagtgttgaagttcggcggtacatcagtggcaaatgcagaacgttttctgcgggttgccgatattctggaaagcaatgccaggcaggggcaggtggccaccgtcctctctgcccccgccaaaatcaccaaccatctggtagcgatgattgaaaaaaccattagcggccaggatgctttacccaatatcagcgatgccgaacgtatttttgccgaacttctgacgggactcgccgccgcccagccgggatttccgctggcacaattgaaaactttcgtcgaccaggaatttgcccaaataaaacatgtcctgcatggcatcagtttgttggggcagtgcccggatagcatcaacgctgcgctgatttgccgtggcgagaaaatgtcgatcgccattatggccggcgtgttagaagcgcgtggtcacaacgttaccgttatcgatccggtcgaaaaactgctggcagtgggtcattacctcgaatctaccgttgatattgctgaatccacccgccgtattgcggcaagccgcattccggctgaccacatggtgctgatggctggtttcactgccggtaatgaaaaaggcgagctggtggttctgggacgcaacggttccgactactccgctgcggtgctggcggcctgtttacgcgccgattgttgcgagatctggacggatgttgacggtgtttatacctgcgatccgcgtcaggtgcccgatgcgaggttgttgaagtcgatgtcctatcaggaagcgatggagctttcttacttcggcgctaaagttcttcacccccgcaccatcacccccatcgcccagtttcagatcccttgcctgattaaaaataccggaaatcctcaagcaccaggtacgctcattggtgccagccgtgatgaagacgaattaccggtcaagggcatttccaatctgaataacatggcaatgttcagcgtttccggcccggggatgaaagggatggttggcatggcggcgcgcgtctttgcagcgatgtcacgcgcccgtatttccgtggtgctgattacgcaatcatcttccgaatacagtatcagtttctgcgttccgcaaagcgactgtgtgcgagctgaacgggcaatgcaggaagagttctacctggaactgaaagaaggtttactggagccgttggcggtgacggaacggctggccattatctcggtggtaggtgatggtatgcgcaccttacgtgggatctcggcgaaattctttgccgcgctggcccgcgccaatatcaacattgtcgccattgctcagggatcttctgaacgctcaatctctgtcgtggtcaataacgatgatgcgaccactggcgtgcgcgttactcatcagatgctgttcaataccgatcaggttatcgaagtgtttgtgattggcgtcggtggcgttggcggtgcgctgctggagcaactgaagcgtcagcaaagctggttgaagaataaacatatcgacttacgtgtctgcggtgttgctaactcgaaggcactcctcaccaatgtacatggccttaatctggaaaactggcaggaagaactggcgcaagccaaagagccgtttaatctcgggcgcttaattcgcctcgtgaaagaatatcatctgctgaacccggtcattgttgactgtacttccagccaggcagtggcggatcaatatgccgacttcctgcgcgaaggtttccacgttgttacgccgaacaaaaaggccaacacctcgtcgatggattactaccatcagttgcgttatgcggcggaaaaatcgcggcgtaaattcctctatgacaccaacgttggggctggattaccggttatcgagaacctgcaaaatctgctcaatgctggtgatgaattgatgaagttctccggcattctttcaggttcgctttcttatatcttcggcaagttagacgaaggcatgagtttctccgaggcgaccacactggcgcgggaaatgggttataccgaaccggacccgcgagatgatctttctggtatggatgtggcgcgtaagctattgattctcgctcgtgaaacgggacgtgaactggagctggcggatattgaaattgaacctgtgctgcccgcagagtttaacgccgagggtgatgtcgccgcttttatggcgaatctgtcacagctcgacaatctctttgccgcgcgtgtggcgaaggcccgtgatgaaggaaaagttttgcgctatgttggcaatattgatgaagatggcgtctgccgcgtgaagattgccgaagtggatagtaatgatccgctgttcaaagtgaaaaatggcgaaaacgccctggccttctatagccactattatcagccgctgccgttggtactgcgcggatatggtgcgggcaatgacgttacagctgccggtgtctttgctgatctgctacgtaccctctcatggaagttaggagtctgacatggttaaagtttatgccccggcttccagtgccaatatgagcgtcgggtttgatgtgctcggggcggcggtgacacctgttgatggtgcattgctcggagatgtagtcacggttgaggcggcagagacattcagtctcaacaacctcggacgctttgccgataagctgccgtcagaacctcgggaaaatatcgtttatcagtgctgggagcgtttttgccaggagctgggtaagcaaattccagtggcgatgactctggaaaagaatatgccaatcggctcgggcttaggctccagtgcctgttcggtggtcgcggcgctgatggcgatgaatgaacactgtggcaagccgcttaatgacactcgtttgctggctttgatgggcgagctggaaggacgaatctccggcagcattcattacgacaacgtggcaccgtgttttcttggtggtatgcagttgatgatcgaagaaaacgacatcatcagccagcaagtgcctgggtttgatgagtggctgtgggtgctggcgtatccggggattaaagtctcgacggcagaagccagggctattttaccggcgcagtatcgccgccaggattgcattgcgcacgggcgacatttggcaggcttcattcacgcctgctattcccgtcagcctgagcttgccgcgaatctgatgaaagatgttatcgctgaaccctaccgtgaacggttactgcctggtttccggcaggcgcggcaggcggtcgcggaaatcggcgcggtagcgagcggtatctccggctccggcccgactttgttcgctctgtgtgacaagccggataccgcccagcgcgttgccgactggttgggtaagaactacctgcaaaatcaggaaggttttgttcatatttgccggctggatacggcgggcgcacgagtactggaaaactaaatgaaactctacaatttgaaagatcacaatgagcaggtcagctttgcgcaagccgtaacccaggggttgggcaaaaatcaggggctgtttttcccgcacgacctgccggaattcagcctgactgaaattgatgagatgctgaagctggattttgtcacccgcagtgcgaagatcctctcggcgtttattggtgatgaaatcccgcaggaaatcctggaagagcgcgtacgcgcggcgtttgccttcccggctccggtcgccaatgttgaaagcgatgtcggttgtctggaattgttccacgggccaacgctggcatttaaagatttcggcggtcgctttatggcacaaatactgacccatattgcgggcgataagccagtgaccattctgaccgcgacatccggtgatactggagcggcagtggctcatgctttctacggtttaccgaatgtgaaagtggttatcctctatccacgaggcaaaatcagtccactgcaagaaaaactgttctgtacattgggcggcaatatcgaaactgttgccatcgacggcgatttcgatgcctgtcaggcgctggtgaagcaggcgtttgatgatgaagaactgaaagtggcgctggggctaaactctgctaactccattaacatcagccgtttgctggcgcagatttgctactactttgaagctgttgcgcagctgccgcaggaagcgcgcaaccagctggttgtctcggtgccaagcggaaacttcggcgatttgacggcgggtctgctggcgaagtcactcggtctgccggtgaaacgttttattgctgcgaccaacgtgaacgataccgtgccacgtttcctgcacgacggtcagtggtcacccaaagcgactcaggcgacgttatccaatgcgatggatgttagccagccaaacaactggccgcgtgtggaagagttgttccgccgcaaaatctggcaactgaaagagctggggtatgcagccgtggatgatgaaaccacgcaacagacaatgcgtgagttaaaagaactgggctatacctcggagccgcacgctgccgtagcttatcgtgcgctgcgtgaccagttgaatccaggcgaatatggcttgttcctcagcaccgcgcatccggcgaaatttaaagagagcgtggaagcgattctcggtgaaacgttggatctgccaaaagagctggcagaacgtgctgatttacccttgctttcgcataacctgcccgccgattttgctgcgttgcgtaaattgatgatgaatcatcagtaacatctattcattatctcaatcaggccgggtttgcttttatgcagcccggcttttttatgaagaaaatatggagaaaaatgacagggaaaaaggagaaattctcaataaatgcggtaatttagagattaggattgcggagaataacaactgccgttctcatcgcgtaatctccggatatcgacccataacgggcaatgataaaaggagtaacctgtgaaaaagatgcaatctatcgtactcgcactttccctggttctggtcgctcccatggcagcgcaggctgcggaaattacgctagtcccgtcagtaaaattacagataggcgatcgtgataatcgtggctattactgggatggcggtcactggcgcgaccacggctggtggaaacaacattatgaatggcgaggcaatcgctggcacccatatggaccgccgccatcgccgcgccataacaagcacaatgatcatcgtggcgatcatcgtccggggcctgacaaacatcatcgctaaatatcaatgccggattgccatccggcattatccggcattatccggcattgactacaaacttaacgttgttcgtagcgtttaaacaccagttcgccattgctggaggaagcttcatcaaagaagtaaccttcgctattaaaaccagtcagttgctctggtttggtcagccgattttcaataatgaaacgactcatcagaccgcgtgctttcttagcgtagaagctgattatcttaaatttgccgttcttctcatcgaggaacactggtttgataatctcggcattcaatttcttcggcttcaccgatttaaaatactcatctgacgccagatttatcactacattatcgccttgtgctgcgagcgcctcgttcagcttgttggtgatgatatctccccagaattgatacagatctttccctcgggcattctcaagacgtatccccatttccagacgataaggctgcattaaatcgagcgggcgcagtacgccatacaagccggaaagcattcgcaaatgctgttgggcaaaatcgaaatcgtcttcgctgaaggtttcggcctgcaagccagtgtagacatcacctttaaacgccagaattgcctggcgggcattctccggtgtgaaatctggctgccagtcatgaaagcgagcggcgttgatacccgccagtttgtcgctgatgcgcatcagggagctaatctgcgggggcgtcagtttccgcgcttcatggatcagctgctgggagttgtctaacagctccggcagcgtatagcgcgtggtggtcaacgggctttggtaatcaagcgttttcgcaggtgaaataagaatcagcatatccagtccttgcaggaaatttatgccgactttagcaaaaaaagagaatgagttgatcgatagttgtgattactcctgcgaaacatcatcccacgcgtctggagaaagctggcgaccgatctccggataacgcaacggatcaaacaccgggcgcacgccgagtttacgctggcgtagataatcactggcaatggtatgaaccacaggcgagagcagtaatatggcggtcaaattggtaatagccatgcaggccataatgatatctgccagttgccacatcagcggaaaacttagcaaggtgccgccgatgaccgttgcgaaggtgcagatccgcagacaccagatcgctttagggttgttcaggcgtaaaaagaagaaattgttttcggcataaatgtagttggcaacgatggagctgaaggcaaacagaataaccacgagggtaacaaactccgcaccccaggaacccattagcacccgcatcgccttctggataagctgaataccttccagcggcatgtaggttgtgccgttacccgccagtaatatcagcatggcgcttgccgtgcagatgaccagggtgtcgataaaaatgccaatcatctggacaattccttgcgctgccggatgcggaggccaggacgcagctgccgctgccgcgtttggcgtcgaccccattcccgcctcattggaaaacatactgcgctgaaaaccgttagtaatcgcctggcttaaggtatatcccgccgcgccgcctgcagcttcctgccagccaaaagcactctcaaaaatagaccaaatgacgtggggaagttgcccgatattcattacgcaaatcaccaggcaggtcagtacccagattatcgccatcaacgggacaaacccctgcatgagccgggcgacgccatgaagaccgcgagtgatcgccagcatagcaaagacagcgagaataatacctgtcaccagcgggggaaaatcaaaagaaaaactcagggctcgcgcaacggcgttcgcctgaactccgctgaaaattatggcgtaggcgatgagcaaaaagacggcgaacagaacgcccatccagcgcatccccagcccgcgcgccatataccatgccggtccgccacgaaactgcccattggcatcacgttctttataaagctgtgcgagggaacattcggcaaacgaggtcgccatgccgataaatgcggcaacccacatccagaagacggctccaggtccaccggcggtaattgccagcgcaacgccggccaggttgccgctacccacgcgcgctgcaagactggtacacaatgactgaaatgaggttaaaccgcctggctgtggatgaatgctatttttaagacttttgccaaactggcggatgtagcgaaactgcacaaatccggtgcgaaaagtgaaccaacaacctgcgccgaagagcaggtaaatcattaccgatccccaaaggacgctgttaataaaggagaaaaaatctggcatgcatatccctcttattgccggtcgcgatgactttcctgtgtaaacgttaccaattgtttaagaagtatatacgctacgaggtacttgataacttctgcgtagcatacatgaggttttgtataaaaatggcgggcgatatcaacgcagtgtcagaaatccgaaacagtctcgcctggcgataaccgtcttgtcggcggttgcgctgacgttgcgtcgtgatatcatcagggcagaccggttacatccccctaacaagctgtttaaagagaaatactatcatgacggacaaattgacctcccttcgtcagtacaccaccgtagtggccgacactggggacatcgcggcaatgaagctgtatcaaccgcaggatgccacaaccaacccttctctcattcttaacgcagcgcagattccggaataccgtaagttgattgatgatgctgtcgcctgggcgaaacagcagagcaacgatcgcgcgcagcagatcgtggacgcgaccgacaaactggccgtaaatattggtctggaaatcctgaaactggttccgggccgtatctcaactgaagttgatgcgcgtctttcctatgacaccgaagcgtcaattgcgaaagcaaaacgcctgatcaaactctacaacgatgcaggtattagcaacgatcgtattctgatcaaactggcttctacctggcagggtatccgtgctgcggaacagctggaaaaagaaggcatcaactgtaacctgaccctgctgttctccttcgctcaggctcgtgcttgtgcggaagcgggcgtgttcctgatctcgccgtttgttggccgtattcttgactggtacaaagcgaataccgataagaaagagtacgctccggcagaagatccgggcgtggtttctgtatctgaaatctaccagtactacaaagagcatggttatgaaaccgtggttatgggcgcaagcttccgtaacatcggcgaaattctggaactggcaggctgcgaccgtctgaccatcgcaccggcactgctgaaagagctggcggagagcgaaggggctatcgaacgtaaactgtcttacactggtgaagtgaaagcgcgtccggcgcgtatcactgagtccgagttcctgtggcagcacaaccaggatccaatggcagtagataaactggcggaaggtatccgtaagtttgctgttgaccaggaaaaactggaaaaaatgatcggcgatctgctgtaatcatacttagcgtgaccgggaagtcggtcacgctacctcttctgaaacctgtctgtcactcccttcgcagtgtatcattctgtttaacgagactgtttaaacggaaaaatcttgatgaatactttacgtattggcttagtttccatctctgatcgcgcatccagcggcgtttatcaggataaaggcatccctgcgctggaagaatggctgacatcggcgctaaccacgccgtttgaactggaaacccgcttaatccccgatgagcaggcgatcatcgagcaaacgttgtgtgagctggtggatgaaatgagttgccatctggtgctcaccacgggcggaactggcccggcgcgtcgtgacgtaacgcccgatgcgacgctggcagtagcggaccgcgagatgccaggctttggtgaacagatgcgccagatcagcctgcattttgtaccaactgcgatcctttcgcgtcaggtgggggtgattcgcaaacaggcgctgatccttaacttacccggtcaaccgaagtctattaaagagacgctggaaggtgtgaaggacgctgagggtaacgttgtggtgcacggtatttttgccagcgtaccgtactgcattcagttgctggaagggccatacgttgaaacggcaccggaagtggttgcagcattcagaccgaagagtgcaagacgcgaagttagcgaataaaaaaatccccccaagcggggggatcagactgatgacaaacgcaaaactgcctgatgcgctacgcttatcaggcctacgatcttcttgcaatatattgaatttgcacgattttgtaggccggataaggcgttcacgccgcatccggcataaacaaagcgcacgttgttaacaatcttatcccttcgagcggggggagcttaataattagtgagactcaccaatcggcagaacggtgcgaccaaactgctcgttcagcacttcacccatcgccagatagattgcactggcaccgcagataagaccaatccagccggcaaagtggatgatcgcggcgttaccggcaatgttaccgatcgccagcagggcaaacagcacggtcaggctaaagaaaacgaattgcagaacgcgtgcgcctttcagcgtgccgaagaacataaacagcgtaaatatgccccacagacccaggtagacaccaaggaactgtgcatttggcgcatcggtcagccccagtttcggcatcagcagaattgcaaccagcgtcagccagaaagaaccgtaagaggtgaatgcggttaaaccgaaagtgttgccttttttgtactccagcagaccggcaaaaatttgcgcgatgccgccgtagaaaatgcccatggcaagaataataccgtccagagcaaaataacccacgttgtgcaggttaagcagaatggtggtcatgccgaagcccatcaggcccagcggtgccggattagccaacttagtgttgcccataattcctcaaaaatcatcatcgaatgaatggtgaaataatttccctgaataactgtagtgttttcagggcgcggcataataatcagccagtggggcagtgtctacgatcttttgaggggaaaatgaaaattttccccggtttccggtatcagacctgagtggcgctaaccatccggcgcaggcaggcgatttgcagtacggctggaattgtcacgcgataggcactgccgctgaccgctttaaccccatttaatgctgcgcccacagggcctcccagacccgcgccgcgcagcaaaccatgcccaagcacgctcattgctgcgtgggtgcgtaaaatgcgggtcaattggctggaaagcaaatgcgacacaccttttgccaataatttgtctttcatcagcagcggcagcagctcttccagctcattcaccctggcatcgaccgcgtgcagaaactcctgcttatgttcctcgtccattttcttccaggtattacgcagaaattgttccagtaactgttgctcaatttcaaacgtagacatctctttgtcggctttcagcttcaatcgctttgaaacatcgagcaaaatggcgcgatacaatttaccgtgtccgcgcagtttgttggcgatactatcgccaccaaaatgctgaaattctccggcaatcagctgccagttgcggcggtgtcgctcgggatgtccttccatcgatttaaacagttcgttgcgcatcagtacgctggagaggcgagttttgcctttttcattatgggtgagcagccgggcgaaatttgccaactgttcctcactacaatgctggagaaaatccagatctgaatcattcaggtaattaacattcattttttgtggtttctatattctggcgttagtcgtcgccgataattttcagcgtggccatatccgatgagttcactgtatgaccggaaaaggtgatttttgagacgcagcgtttgttgtcgttatcgctgttaatgttgatccagtcagtggtttgctcttcttttatttctgaaggaatattcagggtctgactggcgcttcgggtggctttgaaataaatcgatgcaccgcttaactgcaaatcgccatggtcggctgagagttgtatgcgtttaacaatgcgacaaacaggaagtttcagcgccagatcgttggtttcgtttcgcggcattgcaatgacgccgaggattttatggtcgtttgcctgcgccgtgcagcacagcatcaggctaatcgccaggctggcggaaatcgtaataacggatttcataaggattctcttggtggggaggggtaaggggatgaaactagtttactgctgataaagagaagtttcaggtacgtaatattttctttttattacaattttttgatgaatgccttggctgcgattcattctttatatgaataaaattgttgtcagtttcacgtcttgtcctgccatatcgcgaaatttctgcgcaaaagcacaaaaaatttttgcatctcccccttgatgacgtgggttacgaccccatttagtagtcaaccgcagtgagtgagtctgcaaaaaaatgaaattgggcagttgaaaccagacgtttcgcccctattacagactcacaaccacatgatgaccgaatatatagtggagacgtttagatgggtaaaataattggtatcgacctgggtactaccaactcttgtgtagcgattatggatggcaccactcctcgtgtactggagaacgccgaaggcgatcgcaccacgccttctatcattgcctatacccaggatggtgaaactctggttggtcagccggctaaacgtcaggcagtgacgaacccgcaaaacaccctgtttgcgattaaacgcctgattggccgccgcttccaggacgaagaagtacagcgtgatgtttccatcatgccgttcaaaattattgctgctgataacggcgacgcatgggtcgaagttaaaggccagaaaatggcaccgccgcagatctctgcagaagtgctgaaaaaaatgaagaaaaccgctgaagattacctgggtgaaccggtaactgaagctgttattaccgtaccggcatactttaacgatgctcagcgtcaggcaaccaaagacgcaggccgtatcgctggtctggaagtaaaacgtatcatcaacgaaccgaccgcagctgcgctggcttacggtctggacaaaggtactggcaaccgtactatcgcggtttatgacctgggtggtggtactttcgatatttccattatcgaaatcgacgaagttgacggcgaaaaaaccttcgaagttctggcaaccaacggtgatacccacctgggtggtgaagacttcgacagtcgtctgatcaactatctggttgaagaattcaagaaagatcagggcattgacctgcgcaacgatccgctggcaatgcagcgcctgaaagaagcggcagaaaaagcgaaaatcgaactgtcttccgctcagcagaccgacgttaacctgccgtacatcactgcagacgcgaccggtccgaaacacatgaacatcaaagtgactcgtgcgaaactggaaagcctggttgaagatctggtaaaccgttccattgagccgctgaaagttgcactgcaggacgctggcctgtccgtatctgatatcgacgacgttatcctcgttggtggtcagactcgtatgccaatggttcagaagaaagttgctgaattctttggtaaagagccgcgtaaagatgttaacccggacgaagctgtagccatcggtgctgctgttcagggtggtgttctgactggtgacgtaaaagacgtactgctgctggacgttaccccgctgtctctgggtatcgaaaccatgggcggtgtgatgaccacgctgatcgcgaaaaacaccactatcccgaccaagcacagccaggtgttctctaccgctgaagacaaccagtctgcggtaaccatccatgtgctgcagggtgaacgtaaacgtgcggctgataacaaatctctgggtcagttcaacctggatggtatcaacccggcaccgcgcggcatgccgcagatcgaagttaccttcgatatcgatgctgacggtatcctgcacgtttccgcgaaagacaaaaacagcggtaaagagcagaagatcactatcaaggcttcttctggtctgaacgaagatgaaatccagaaaatggtacgcgacgcagaagctaacgccgaagctgaccgtaagtttgaagagctggtacagactcgcaaccagggcgaccatctgctgcacagcacccgtaagcaggttgaagaagcaggcgacaaactgccggctgacgacaaaactgctatcgagtctgcgctgactgcactggaaactgctctgaaaggtgaagacaaagccgctatcgaagcgaaaatgcaggaactggcacaggtttcccagaaactgatggaaatcgcccagcagcaacatgcccagcagcagactgccggtgctgatgcttctgcaaacaacgcgaaagatgacgatgttgtcgacgctgaatttgaagaagtcaaagacaaaaaataatcgccctataaacgggtaattatactgacacgggcgaaggggaatttcctctccgcccgtgcattcatctaggggcaaatcaaaaaagatggctaagcaagattattacgagattttaggcgtttccaaaacagcggaagagcgtgaaatcaaaaaggcctacaaacgcctggccatgaaataccacccggaccgtaaccagggtgacaaagaggccgaggcgaaatttaaagagatcaaggaagcttatgaagttctgaccgactcgcaaaaacgtgcggcatacgatcagtatggtcatgctgcgtttgagcaaggcggcatgggcggcggcggttttggcggcggcgcagacttcagcgatatttttggtgacgttttcggcgatatttttggcggcggacgtggtcgtcaacgtgcggcgcgcggtgctgatttacgctataacatggagctcaccctcgaagaagctgtacgtggcgtgaccaaagagatccgcattccgactctggaagagtgtgacgtttgccacggtagcggtgcaaaaccaggtacacagccgcagacctgtccgacctgtcatggttctggccaggtgcagatgcgccagggtttctttgccgtgcagcagacctgtccacactgtcagggccgcggtacgctgatcaaagatccgtgcaacaaatgtcatggtcatggtcgtgttgagcgcagcaaaacgctgtccgttaaaatcccggcaggggtggacactggagaccgcatccgtcttgcgggcgaaggtgaagcgggtgaacacggcgcaccggcaggcgatctgtacgttcaggttcaggttaaacagcacccgattttcgagcgtgaaggcaacaacctgtattgcgaagtcccgatcaacttcgctatggcggcgctgggtggtgaaatcgaagtaccgacccttgatggtcgcgtcaaactgaaagtgcctggcgaaacccagaccggtaagctgttccgtatgcgcggtaaaggcgtcaagtatgtccgcggtggcgcacagggtgatttgctatgccgcgttgttgtcgaaacaccggtaggtttgaacgagaagcagaaacagctgctgcaagagctgcaagaaagctttggtggcccaaccggcgagcacaacagcccgcgttcaaagagcttctttgatggcgtgaagaagttttttgacgacctgactcgctaacctccccaaaagcctgcccgtgggcaggccagggtaaaaaccagggtgcgttgaagatatgcgagcacctgtaaagtggcggggatcactccccgccgttgctcttactcggattcgtaagccgtgaaaacagcaacctccgtctggccagttcggatgtgaacctcacagaggtcttttctcgttaccagcgccgccactacggcggtgatacagatgacgatcagggcgacaatcatcgccttatgctgcttcattgctctcttctccttgacctttcggtcagtaagaggcactctacatgtgttctgcatatagggggcctcgggttgatggtaaaatatcactcggggcttttctctatctgccgttcagccaatgcctgagacagacagcctcaagcacccgccgctattatactgcgcttttaattcacttctgttttatcaattctttttctgaagacgcctcgcatttttgcggaataatatttcaatacatcaatttatttaacttaaatatatccagggattcacaaaaaaaggtgttttcctctatcaaaagtgaatggctaaaggaaattaattattaaaggttactgtaatactatagagagacaaagaaatacgttcagcagctaatgctaagttcatcatgaaaaatgcctataaatcaaagggtgatgtttaaaacagacacattttctgaaacacgatatccctccgcccgttcgcaaaagtaatctgcgatcttcatcacgcttcgatagtcatctttaaatatactggcctggtcattcttaataaaaatgaattgtctggtgtattaattcctatggaatcataaaaacaatgaatggagaacatattatatgtctgccaaaagacgacttcttattgcgtgtaccttgataacagctatctatcattttcctgcatattcttcattagaatataaaggaacctttggttcaataaatgcgggttatgcagactggaacagtggatttgtaaacactcaccgtggtgaagtatggaaagtgactgcggattttggggtaaattttaaagaagcagaattttactcattttatgaaagtaatgtactcaatcatgctgtagcagggagaaatcatacggtttcagcaatgacgcatgtcagactctttgactctgatatgacattctttggcaaaatttatggccaatgggataactcatggggtgacgatctggacatgttttatggattcggttacctcggctggaacggcgagtggggcttttttaaaccgtatattggattgcataatcaatctggtgactacgtatcagctaaatatggtcaaacgaatggttggaatggttatgttgttggctggacagcagtattaccatttacgttatttgacgaaaaatttgttttatctaactggaatgaaatagaactggacaggaacgatgcttacacggagcagcaatttggccggaacgggttaaatggcggtttaactattgcctggaagttctatcctcgctggaaagcaagtgtgacgtggcgttatttcgataataagctgggctacgatggctttggcgatcaaatgatttatatgcttggttatgatttctaatttttatcagggaataattatgcagaaaacgttaatggccagtttgatcggccttgcagtttgcacagggaatgcttttagtcctgccttagccgcagaggctaaacaacctaatttagtcattattatggcggatgatttaggttatggcgatttagcaacatatggtcatcagatcgttaaaacacctaatatcgacaggcttgcccaggaaggggtcaaatttactgactactatgcccccgctcctttaagttcaccttcacgcgcagggctattaaccggccggatgccatttcgtactggaattcgctcatggattccttcaggcaaagatgttgccttagggcgtaacgaactcacgattgctaatctactcaaagcgcaagggtacgacacggcaatgatgggtaagctgcatctgaatgcaggcggcgatcgcaccgatcagccacaagcacaagatatgggctttgattactcactggctaatacggcgggctttgttaccgacgccacgctggataacgctaaagaacgcccgcgttatggcatggtttacccgacaggctggctacgtaatgggcaacccactccacgagccgataaaatgagcggtgagtatgtcagttcggaagtcgtcaactggctggataacaaaaaggacagcaagcctttcttcctctatgttgcttttaccgaagtgcatagccccctggcttcgcccaaaaaatacctcgacatgtactcacaatatatgagcgcgtatcagaagcagcatcctgatttattttatggcgactgggcagacaaaccctggcgtggtgtgggggaatattatgccaatatcagctatctggatgcacaggttggaaaagtgctggataaaatcaaagcgatgggtgaagaagataacacaatcgttatttttaccagtgataacggtccggtaacgcgtgaagcgcgcaaagtgtatgagctgaatttggcaggggaaacggatggattacgcggtcgcaaggataacctttgggaaggcggaattcgtgttccagccattattaaatatggtaaacatctaccacagggaatggtttcagatacacccgtttatggtctggactggatgcctactttagcgaaaatgatgaacttcaaattacctacagaccgtactttcgatggtgaatcgctggttcctgttcttgagcaaaaagcattgaaacgcgaaaagccattaattttcgggattgatatgccattccaggatgatccaaccgatgaatgggcgatccgtgatggtgactggaagatgattatcgatcgcaataataaaccgaaatatctctacaatctgaaatctgatcgttatgaaacacttaatctgatcggtaaaaaaccagatattgaaaaacagatgtatggtaagtttttaaaatataaaactgatattgataatgattctctaatgaaagccagaggtgataaaccagaagcggtgacctggggctaacctgataatcataataaatgtaatgtatgccatttagggctatgcccgcctgattcagtgctacgcattgaatcaggttcttttcgcgttgaacaatatcaagatacggctattcgcagggagtggatatgtttaccaacgtaaatgttgattgttgcaaaacaccaggatgtaaaaacttggggttgctgaatagccaggattatgtcgcacagggtaaaaatattttatgccgtgaatgtggttacttgtttccagtgatatctgaacagtcgcttaatatttatcgtaatattgtgaatcactcctggagaggtttgatttgccaatgttcaacttgcggaggcacgtccctcaaaaaatatggatattctgcacaaggccagagaagaatgtattgccatcattgtgagaaaacatttatcactctggaacacgtaattaccacaccacgaggagcccagttagcattgatgattgagcaaggggaggcacttgcggatatcagaaagtcattacttcttaacagcactggacttagccgtgaactgttaaaattagcgcgtgaagcaaactataaagaaagtcgacagtgtttcccagcttctgatattaccctgagtacccgcgcttttcgcgtcaagtataatggtagcaataactctctttatgctcttgttaccgcagaagaacaaagcggcagggtggttgctatctcaaccaattactccccatctgccgtagagcaacattatcaatacacatcgaactatgaagagcgtatgtctccagggacgctggcacatcatgtccagcgcaaagagttacttactatgcggcgggataccttgtttgatattgattacggcccggcagttttacatcaaaacgatccgggaatgttggtaaaaccggttcttccggcatatcgtcattttgaactggtcagaatactgaccgatgagcattccaacaacgttcagcattaccttgatcacgaatgctttatattgggcggctgcctgatggctaatttgcagcatattcatcaaggtcgctgccatatttcctttgtcaaagagcgcggtgtggcacccgccaccattgattttccaccgcgattattccttagtggtggggtacgaaataatgtctggcgtgcattttctaaccgcaattattcaatggctgtatgcaatctcactggcagtaagaaagtccgcgagatgcggcatgcaacattgaacagtgcgacgcgttttatccactttgtggagaaccatcctttccttatatcattgaaccgaatgtctcctgcgaatgtcgtttctacattagatatcctcaaacatctgtggaataaaaaactagagcatggaacaatttaattattacttttccgaataatttcttcagaaatcttgacattagactatgattaatggggtttaaggtcatcagccgccgctttcgggcatcaaaaactcatctctcgctgatggcgcaattcttttaatagatcgtaaaaagcgagctattcctacactataatctgattttaacgatgattcgtgcggggtaaaatcgtgaaaacgatctattcacctgaagagaaataaaaagtgaaacatctgcatcgattctttagcagtgatgcctcgggaggcattattctcattattgccgctgtattagcgatgattatggccaacagcggtgcaaccagtggatggtatcacgactttcttgagacgccggttcagctccgggttgggacacttgagatcaacaagaacatgctgctatggatcaatgacgctctgatggcggtatttttcctgttggttggtctggaagttaaacgcgagctgatgcaaggttcgctggccagtctgcgccaggcggcatttcctgttattgccgcaatcggcgggatgattgtcccggcattgctctatctggcttttaactatgccgatccgattacccgcgaaggctgggcaatcccggcggcgactgacattgcctttgcacttggtgtgttggcgctgttgggaagtcgtgttccgttagcgctgaagatctttttgatggctctggctattatcgacgatcttggggccatcattatcatcgcattgttctacactaatgacttatcgatggcctctcttggcgtcgcggctgtagcaattgcggtactcgtggtattgaatctgtgtggtgtacgccgcacgggcgtttatattctggttggcgtggtgctgtggacagcggtgttgaaatcgggggttcacgcaaccctggctggcgtcattgtcggcttctttattcctttgaaagagaagcatgggcgctctccggctaaacgtctggagcatgttttgcatccatgggtggcgtatctgattttgccgctgtttgcatttgctaatgctggcgtttcactgcaaggtgtcacgctggaaggtttgacctccatcctgccattaggggtcatcgctggtttgctgattggcaagccactgggtattagtctgttctgctggttggcgctgcgtttgaaattggcacatctgccagagggaacgacttaccagcaaattatggcggttggtatcctgtgcggtatcggttttactatgtctatctttattgccagcctggcatttggtagcgtagatccagaactgattaactgggcaaaattaggtatccttgtcggttcaatttcttcggcggtaattggatatagctggttacgcgttcgtttacgtccatcagtttgacaggacgatgtactggggagccataaacggctcccttttcattgttatcagggagagaaatgagcatgtctcatatcaattacaaccacttgtattacttctggcatgtctacaaagaaggttctgtggttggcgcagcggaggcgctttatttaacaccacaaaccattaccgggcagatccgggcgctggaagagcgcctgcaagggaaactatttaagcgtaaaggacgtggtctggaacccagcgaactgggggaactggtctatcgctatgccgataaaatgttcaccttaagccaggaaatgctggatatcgtcaactatcgcaaagagtccaacttattgtttgatgttggtgtggcagatgcactttccaaacgtctggtcagcagtgttctggatgccgcagttgtggaagacgagcagatccatctacgctgtttcgaatcgacgcacgagatgcttttagagcagttgagtcagcataaactggatatgatcatctctgactgtccgatcgattccactcagcaggaagggctgttttccatgaaaattggcgaatgtggtgtcagtttctggtgcactaacccactaccagaaaagccgtttcctgcctgtcttgaagagcgtcgtttacttattccggggcgtcgctcaatgttggggcgtaagctattaaactggtttaactcccagggcttgaacgtcgaaattttgggtgagtttgatgatgctgcgttgatgaaagcctttggggcgacgcataacgctattttcgttgcaccttcgctttacgctaatgatttctataacgatgactcggttgtggagataggccgtgttgagaacgtgatggaagagtaccacgcgatttttgccgaaaggatgattcagcaccctgcagtacagcgtatctgcaatacagactattctgcgctgtttactccagcttcaaaataaacatttgtactttgcaggccgaattttggcctgcagatggatataaaaaaacccgccagagcgggtttttttacaaagctgacaacaacaggcaattaagccagtttgttgatctgtgcagtcaggttagccttatgacgtgcagctttgtttttgtggatcagacctttagcagcctgacggtccacgattggttgcatttcgttaaatgctttctgtgcagcagctttgtcgccagcttcgatagctgcgtatactttcttgatgaaagtacgcatcatagagcgacggcttgcgttgtgcttacgagccttttcagactgaatggcgcgcttcttagctgatttgatattagccaaggtccaactcccaaatgtgttctatatggacaattcaaaggccgaggaatatgcccttttagccttcttttgtcaatggatttgtgcaaataagcgccgttaatgtgccggcactcgttacgtagtgatggcgcaggattctaccagcttgcggggtgtgaatacagcttttccgcgagaaaaattgcagcaggcggtcagtttcttcccatgatttgcgccatggcaatgaaaagccacttctttctgattccggtactcaatcgccggttaaccttaaccgctgtacaaggtatactcggacgattttcactgttttgagccagacatgaagctgatacgcggcatacataatctcagccaggccccgcaagaagggtgtgtgctgactattggtaatttcgacggcgtgcatcgcggtcatcgcgcgctgttacagggcttgcaggaagaagggcgcaagcgcaacttaccggtgatggtgatgctttttgaacctcaaccactggaactgtttgctactgataaagccccggcacggctcacccggctgcgggaaaaactgcgttatcttgcagagtgtggcgttgattacgtgctgtgcgtgcgttttgacaggcgttttgcggcgttaaccgcgcaaaacttcatcagtgatcttctggtgaagcacttgcgggtaaaatttcttgccgtaggtgacgatttccgctttggcgctggtcgtgaaggcgatttcttgttattacagaaagcgggcatggaatacggcttcgatatcaccagcacgcaaactttttgcgaaggtggcgtgcgtatcagcagcaccgccgtgcgtcaggcgcttgcggatgacaatctggctctggcagaaagtttactggggcacccgtttgctatctccgggcgtgtagtccacggtgatgaattagggcgcactataggtttcccgacggcgaatgtaccgctacgccgtcaggtttccccggtgaaaggggtttatgcggtagaagtgttgggccttggcgaaaagccgttacccggcgttgcaaacatcggaacacgcccaacggttgccggtattcgccagcaactggaagtgcatttgttagatgttgcaatggacctttatggtcgccatatacaagtagtgctgcgtaaaaaaatacgcaatgagcagcgatttgcatcgctggacgaactgaaagcgcagattgcgcgtgatgaattaaccgcccgcgaattttttgggctaacaaaaccggcttaagcctgttatgtaatcaaaccgaaatacggaaccgagaatctgatgagtgactataaatcaaccctgaatttgccggaaacagggttcccgatgcgtggcgatctcgccaagcgcgaaccgggaatgctggcgcgttggactgatgatgatctgtacggcatcattcgtgcagctaaaaaaggcaaaaaaaccttcattctgcatgatggccctccttatgcgaatggcagcattcatattggtcactcggttaacaagattctgaaagacattatcattaagtccaaagggctttctggatatgactcgccgtatgtgcctggctgggactgtcatggtctgccaatcgaactgaaagtagagcaagaatacggtaagccgggggagaaattcaccgccgctgagttccgcgccaagtgccgcgaatacgctgcgacccaggttgacggtcagcgcaaagactttatccgtctgggcgtgctgggcgactggtcgcacccgtacctgaccatggacttcaaaactgaagccaacatcatccgcgcgctgggcaaaatcatcggcaacggtcacctgcacaaaggcgcgaagccggtgcactggtgcgttgactgccgttctgcactggcagaagcggaagttgagtattacgacaaaacttctccgtccatcgacgtcgctttccaggcggtcgatcaggatgcgctgaaaacgaaatttggcgtaagcaatgttaacggcccaatttcgctggttatctggaccaccacgccgtggacgctgcctgctaaccgcgcaatctccattgcacctgattttgattatgcgctggtgcaaatcgacggtcaggccgtgatcctcgcgaaagatctggttgaaagcgtaatgcagcgtatcggcgttagcgattacaccattcttggcacggtgaaaggtgccgagctggaactgttgcgctttacccatccgtttatggacttcgatgttccggcaattctcggcgaccacgttacgctggatgccggtaccggtgccgttcataccgcgccaggccacggtccggacgactatgtgatcggtcaaaaatatggtctggaaaccgctaacccggttggcccggacggcacttatctgccgggtacttacccgactctggatggcgttaacgtcttcaaagcgaacgatattgtcattgcgttgttgcaggaaaaaggcgcactgttgcacgttgagaaaatgcaacacagctatccgtgctgctggcgtcataaaacgccgatcatcttccgcgcgacgccgcagtggttcgtcagcatggatcagaaaggtctgcgtgcgcagtcactgaaagagatcaaaggcgtgcagtggatccctgactggggccaggcgcgtatcgagtcgatggttgctaaccgtcctgactggtgtatctctcgtcagcgtacctggggcgtgccgatgtcactgttcgtgcacaaagacacagaagaactgcatccgcgtactctcgaactgatggaagaagtggcaaaacgcgttgaagttgacggcattcaggcgtggtgggatctcgatgcgaaagagatcctcggcgacgaagctgatcagtacgtgaaagtgccggatacgctggatgtatggtttgactccggatctacccactcttccgttgttgacgtgcgtccggaatttgccggtcacgcagcggacatgtatctggaaggttctgaccagcaccgtggctggttcatgtcctctctgatgatctctaccgcgatgaagggcaaagcaccgtatcgtcaggtactgacccacggctttaccgtggatggtcagggccgcaagatgtctaaatccatcggcaacaccgtttcgccgcaggatgtgatgaacaaactgggcgcggatattctgcgtctgtgggtggcatcaactgactacaccggtgaaatggccgtttctgacgagatcctgaaacgtgctgccgacagctatcgtcgtatccgtaacaccgcgcgcttcctgctggcaaacctgaacggttttgatccggcaaaagatatggtgaaaccggaagagatggtggtactggatcgctgggccgtaggttgtgcgaaagcggcacaggaagacatcctcaaggcgtacgaagcatacgatttccacgaagtggtacagcgtctgatgcgcttctgctccgttgagatgggttccttctacctcgacatcatcaaagaccgtcagtataccgccaaagcggacagcgtggcgcgtcgtagctgccagactgcgctgtatcacatcgcagaagcgctggttcgctggatggcaccaatcctctccttcaccgctgatgaagtgtggggttacctgccgggcgaacgtgaaaaatacgtcttcaccggcgagtggtacgaaggcctgtttggtctggcagacagtgaagcaatgaacgatgcgttctgggacgagctgttgaaagtgcgtggcgaagtgaacaaagtcattgagcaagcgcgtgccgataagaaagtgggcggctcgctggaagcggcagtaaccttgtatgcagaaccggaactggcggcgaaactgaccgcgctgggcgatgaattacgatttgtcctgttgacctccggcgctaccgttgcagactataacgacgcacctgctgacgcccagcagagcgaagtcctcaaagggctgaaagtcgcgttgagtaaagccgaaggtgagaagtgccctcgctgctggcactacacccaggatgtcggcaaggtggcggaacacgcagaaatctgcggccgctgtgtcagcaacgtcgccggtgacggtgaaaaacgtaagtttgcctgatgagtcaatcgatctgttcaacagggctacgctggctgtggctggtggtagtcgtgctgattatcgatctgggcagcaaatacctgatcctccagaactttgctctgggggatacggtcccgctgttcccgtcgcttaatctgcattatgcgcgtaactatggcgcagcgtttagtttccttgccgatagcggcggctggcagcgttggttctttgccggtattgcgattggtattagcgtgatcctggcagtgatgatgtatcgctcgaaggccacgcagaagctaaacaatatcgcttatgcgctgattattggcggcgcgctgggcaacctgttcgaccgcctgtggcacggcttcgttgtcgatatgatcgacttctacgtcggcgactggcacttcgccaccttcaaccttgccgatactgccatttgtgtcggtgcggcgttgatcgtgctggaagggtttttaccttctaaagcgaaaaaacaataataaaccctgccggatgcgatgctgacgcatcttatccggcctacagattgctgcgaaatcgtaggccggataaggcgtttacgccgcatccggcaaaaatcctcaaaatataagagcaaacctgcatgtctgaatctgtacagagcaatagcgccgtcctggtgcacttcacgctaaaactcgacgatggcaccaccgccgagtctacccgcaacaacggtaaaccggcgctgttccgcctgggtgatgcttctctttctgaagggctggagcaacacctgttggggctgaaagtgggcgataaaaccaccttctcgttggagccagatgcggcgtttggcgtgccgtcaccggacctgattcagtacttctcccgccgtgaatttatggatgcaggcgagccagaaattggcgcaatcatgctttttaccgcaatggatggcagtgagatgcctggcgtgatccgcgaaattaacggcgactccattaccgttgatttcaaccatccgctggccgggcagaccgttcattttgatattgaagtgctggaaatcgatccggcactggaggcgtaacatgcagatcctgttggccaacccgcgtggtttttgtgccggggtagaccgcgctatcagcattgttgaaaacgcgctggccatttacggcgcaccgatatatgtccgtcacgaagtggtacataaccgctatgtggtcgatagcttgcgtgagcgtggggctatctttattgagcagattagcgaagtaccggacggcgcgatcctgattttctccgcacacggtgtttctcaggcggtacgtaacgaagcaaaaagccgcgatttgacggtgtttgatgccacctgtccgctggtgaccaaagtgcatatggaagtcgcccgcgccagccgtcgtggtgaagaatctattctcatcggtcacgccgggcacccggaagtggaagggacgatgggccagtacagcaacccggaagggggaatgtatctggtcgaatcgccagacgatgtgtggaaactgacggtcaaaaacgaagagaagctctcctttatgacccagaccacgctgtcggtggatgacacgtctgatgtgatcgacgcgctgcgtaaacgcttcccgaaaattgtcggtccgcgcaaagatgacatctgctacgccacgactaaccgtcaggaagcggtacgtgccctggcagagcaggcggaagtggtgctggtggtcggttcgaaaaactcctccaactccaaccgtctggcggaactggcccagcgcatgggcaaacgcgcgtttttgattgacgatgcgaaagatatccaggaagagtgggtgaaagaggttaaatgcgtcggcgtgactgcgggcgcatcggctccggatattctggtgcagaatgtggtggcacgtttgcagcagctgggcggtggtgaagccattccgctggaaggccgtgaagaaaacattgttttcgaagtgccgaaagagctgcgtgtcgatattcgtgaagtcgattaagtcattagcagcctaagttatgcgaaaatgccggtcttgttaccggcattttttatggagaaaacatgcgtttacctatcttcctcgatacagaccccggcattgacgatgccgtcgccattgcagccgcgatttttgctcccgaactcgacctgcaactgatgactaccgtcgcgggtaatgtctcggtagagaaaaccacccgcaacgccctgcaactgctgcatttctggaatgcggagattccgctcgcccagggagccgctgtgccgctggtacgcgcaccgcgtgatgcggcatctgtgcacggcaaatcgggaatggctggctacgactttgttgagcacaaccgaaagccgctcgatgtaccggcgtttctggcgattcgggatgccctgatgcgtgcaccagagcctgttaccctggtagccatcggcccgttaaccaatattgcgctgttactttcacaatgcccggaatgtaagccgtatattcgccgtctggtgatcatgggcggttctgctggtcgcggcaactgcacaccaaacgccgagtttaatatcgctgccgatccagaagcggcagcctgtgtcttccgtagcggcatcgaaatcgtcatgtgcggtctggatgtcaccaatcaggcaatattaacccctgactatctcgctactttgccggaattgaatcgcaccggaaaaatgctacacgccctgtttagccactaccgtagcggcagtatgcaaagtggactacgtatgcacgatctttgcgctatcgcctggctggtgcgcccggaattgttcactctcaaaccgtgttttgtcgcggtagaaactcagggtgaatttacctcaggcacgacggttgttgatatcgacggttgcctgggcaaaccagccaatgtacaggtggcgctggatctggatgtgaaaggcttccagcagtgggtggctgaggtgctggccctggcgctctaataataaaacaaggaagtgttctatgacgtatggagaagcgtatctggaagggtggaaaaacatctttaattatgaaggtgtttccaatcgcttcgagttctggtcgtttatgattggtagtggcgttatctgtctgcttccgcttttatgttggtggttagcggtaacaattaacaatgactatggtgttttcattttttttgcgctgcccgtgtcatttattttaacgttgatttttgccgtaccggcgatagcgttagccgtcagaaggatgcacgatatcggatattcagggtggtgggttaccattgccgtgttgatccctgttacgggcgtaattctgcttatactgtgctgcctgccgtcaaagtcacaagaccaggcataatgccagagggtatgacgcatcactttctgcgtcatgcctttcactgatatccctccctgtttatcattaatttctaattatcagcgtttttggctggcggcgtagcgatgcgctggttactctgaaaacggtctatgcaaattaacaaaagagaatagctatgcatgatgcaaacatccgcgttgccatcgcgggagccgggggccgtatgggccgccagttgattcaggcggcgctggcattagaaggcgtgcagctgggcgcggcgctggagcgcgaaggatcttctttactgggcagcgatgcgggcgaactggccggagccgggaaaacaggcgttactgtgcaaagtagtcttgatgcgataaaagatgattttgatgtgtttatcgattttacccgtccggaaggtacgctgaaccatctcgctttttgtcgccagcatggcaaagggatggtgatcggcactacggggtttgacgaagccggtaaacaggcgattcgtgacgccgccgccgatattgcgattgtctttgccgccaattttagcgttggcgttaacgtcatgcttaaactgctggagaaagcagccaaagtgatgggggactacaccgatatcgaaattattgaagcacatcatagacataaagttgatgcgccgtcaggcaccgcactggcaatgggagaggcgatcgcccacgctcttgataaagatctgaaagattgcgcggtctacagtcgtgaaggccataccggtgaacgtgtgcctggcaccattggttttgccaccgtgcgtgcaggtgacatcgttggcgaacataccgcgatgtttgccgatattggcgagcgtctggagatcacccataaggcatccagccgcatgacatttgctaacggtgcggtaagatcggctttgtggttgagtggtaaggaaagtggtctttttgatatgcgagatgtgcttgatctcaataatctgtaaccataagatatttattgtgatgcaaaaataacacatttaattcattgaatataaagggctttaatttttggcccttttatttttagtgttatgcttttaaatttaatgcaaatgctgaaaattacatattttgtattctgtttttgttgttttaatgtaaattttgaccatttggtccacttttttctgctcattttgatttcatgcaatcttcttgctgcgcaagcgttttccagaacatgttatatgatctttttgtcgcttaatgcctttaaaacatgcatgagccacaaaataatataaaaaatcccgccattaagttgacttttagctcccatatctccagaatgccgccgtttgccagaaattcgtcggtaagcagatttgcattgatttacgtcatcattgtgaattaatatgcaaataaagtgagtgaatattctctggagggtgttttgattaagtcagcgctattggttctggaagacggaacccagtttcacggtcgggccataggggcaacaggttcggcggttggggaagtcgttttcaatacttcaatgaccggttatcaagaaatcctcactgatccttcctattctcgtcaaatcgttactcttacttatccccatattggcaatgtcggcactaatgacgccgatgaagaatcttctcaggttcatgcccaaggtctggtgattcgcgacctgccgctgattgccagcaacttccgtaataccgaagacctctcttcttacctgaagcgccataacatcgtggcgattgccgatatcgatacccgtaagctgacgcgtttactgcgtgagaaaggtgctcagaatggctgcattatcgcaggcgataacccggatgcggcgctggcattagaaaaagcccgcgcgttcccaggtctgaacggcatggatctggcaaaagaagtaaccaccgcagaaccctatagctggacacaagggagctggacactgaccggcggcctgccagaagcgaaaaaagaagacgagctgccgtaccacgtcgtggcctacgatttcggtgccaagcgcaacatcctgcgtatgctggtggatagaggctgtcgcctgaccatcgttccggcgcaaacttctgcggaagatgtgctgaaaatgaatccagacggcatcttcctctccaacggtcctggcgacccggccccgtgcgattacgccattaccgccatccagaaattcctcgaaaccgatattccggtattcggcatctgcctcggccatcagctgctggcgctggcgagcggtgcgaagactgtcaaaatgaaatttggtcaccacggcggcaaccatccggttaaagatgttgagaaaaatgtggtgatgatcaccgcccagaaccacggttttgcggtggatgaagcaacattacctgcaaacctgcgtgtcacacataaatccctgttcgacggtacgttacagggcattcatcgtaccgataaaccggcgttcagcttccagggacacccggaagccagccctggtccacacgacgccgcgccgttgtttgaccactttatcgcgttaattgagcagtaccgtaaaaccgctaagtaatcaggagtaaaagagccatgccaaaacgtacagatataaaaagtatcctgattctgggtgcgggcccgattgttatcggtcaggcgtgtgagtttgactactctggcgcgcaagcgtgtaaagccctgcgtgaagagggttaccgcgtcattctcgtgaactccaacccggcgactatcatgaccgacccggaaatggctgatgcaacctacatcgagccgattcactgggaagtggtacgcaagattattgaaaaagagcgcccggacgcggtgctgccaaccatgggggggcagacggcgctgaactgtgcgctggagcttgagcgtcagggcgtgctggaagagttcggcgtcaccatgattggtgccactgccgatgcgattgataaagccgaagaccgccgccgtttcgacgtagcgatgaagaaaatcggtctggaaactgcgcgttccggtatcgctcattcaatggaagaagcgctggcggttgccgctgaagttggcttcccgtgcattattcgcccatcctttaccatgggcggtagcggtggcggtatcgcttataaccgtgaagaatttgaagaaatttgcgcccgcggtttggatctctccccgaccaaagagctgctgattgatgagtcgctgatcggctggaaagagtacgagatggaagtggtgcgtgataaaaacgacaactgcatcatcgtttgctctatcgaaaacttcgacgcgatgggtatccacaccggtgactctattactgtagcgccagcgcaaacactgaccgacaaagaataccaaatcatgcgtaacgcctcgatggcggtactgcgtgaaatcggcgttgaaaccggtggttctaacgtccagtttgcggtgaacccgaagaacggtcgcctgattgttatcgaaatgaacccgcgtgtgtcgcgttcttcggcgctggcgtcgaaagccaccggcttcccgattgccaaagtggcggcgaaactggcggtgggttacaccctcgacgagctgatgaacgacatcaccggcgggcgtactccggcctccttcgaaccgtccatcgactatgtggtcaccaaaattcctcgctttaacttcgagaaattcgccggtgcgaacgaccgtctgaccacccagatgaaatcggttggcgaagtgatggcgattggacgcacgcagcaggaatctctgcaaaaagccctgcgcggcctcgaagtgggcgcgactggcttcgacccgaaagtgagcctcgacgacccggaagcgctgactaaaatccgccgcgaactgaaagatgctggcgcagagcgtatctggtatatcgctgatgccttccgcgcgggcctgtctgtagacggtgtatttaatttgaccaacattgaccgctggttcctggtacagattgaagagctggtgcgtctggaagagaaagtcgcagaagtgggcatcactggcctgcacgctgaattcctgcgccagttgaaacgcaaaggctttgccgatgcgcgtctggctaaactggcgggcgtgcgcgaagcggaaatccgcaagttgcgcgaccagtatgatctgcacccggtttacaagcgcgtggatacttgtgcggcagagttcgccaccgacaccgcttacatgtactccacttatgaagaagagtgcgaagcgaatccgtccaccgatcgtgaaaaaatcatggtgctcggcggcggcccgaaccgtatcggtcagggtatcgaattcgactactgctgtgtacacgcctcgctggcgctgcgcgaagatggttatgaaaccattatggttaactgtaacccggaaaccgtctccaccgactacgacacctccgaccgcctctacttcgaaccggtaacgctggaagacgtgctggaaattgtgcgtattgagaagccgaaaggcgttatcgttcagtacggcggtcagaccccgctgaaactggcgcgcgcgctggaagctgctggcgtaccggttatcggtaccagcccggatgccatcgaccgtgcggaagaccgtgaacgcttccagcatgcggttgagcgtctgaaactgaaacaaccggcgaacgccaccgttaccaccatcgaaatggcggttgagaaagcgaaagagattggctacccgctggtggtgcgtccgtcttacgttctcggcggtcgggcgatggaaatcgtctatgacgaagctgacctgcgtcgctacttccagacagcggtcagcgtatctaacgatgcgccagtgttgctggaccacttccttgatgacgcagtagaagttgacgtggatgccatctgcgacggcgaagtggtgctgattggcggcatcatggagcatattgagcaggcgggcgtgcactccggtgactccgcatgttcgctgccagcctacaccttaagtcaggaaattcaggatgtgatgcgccagcaggtgcagaaactggccttcgaattgcaggtgcgcggcctgatgaacgtgcagtttgcggtgaaaaacaacgaagtctacctgattgaagttaacccgcgtgcggcgcgtaccgttccgttcgtctccaaagccaccggcgtaccgctggcaaaagtggcggcgcgtgtgatggctggcaaatcgctggctgagcagggcgtaaccaaagaagttatcccgccgtactactcggtgaaagaagtggtgctgccgttcaataaattcccgggcgttgacccgctgttagggccagaaatgcgctctaccggggaagtaatgggcgtgggccgcaccttcgctgaagcgtttgccaaagcgcagctgggcagcaactccaccatgaagaaacacggtcgtgcgctgctttccgtgcgcgaaggcgataaagaacgcgtggtggacctggcggcaaaactgctgaaacagggcttcgagctggatgcgactcacggcacggcgattgtgctgggcgaagcgggtatcaatccgcgtctggtgaacaaggtgcatgaaggccgtccgcacattcaggaccgtattaagaatggcgaatatacctacatcatcaacaccacctcaggtcgtcgtgcgattgaagactcccgcgtgatccgtcgcagtgcgctgcaatataaagtgcattacgacaccaccctgaacggcggctttgccaccgcgatggcgctgaatgccgatgcgaccgaaaaagtaatttcggtgcaggaaatgcacgcgcagatcaaataatagcgtgtcatggcggatatttttcatccgctaatttgatcgaataactaatacggttctctgatgaggaccgttttttttgcccattaagtaaatcttttggggaatcgatatttttgatgacataagcaggatttagctcacacttatcgacggtgaagttgcatactatcgatatatccacaattttaatatggccttgtttaattgctgcaaaacgagtcatagccagtcttttaatttgtgaaactggagttcgtatgtgtgaaggatgtgttgaaaaaccactctatttgttaatcgccgaatggatgatggctgaaaaccggtgggtgatagcaagagagatctctattcatttcgatattgaacacagcaaggcggttaataccctgacttatattctgtcggaagtcacagaaataagctgcgaagttaagatgatccctaataagctggaagggcggggatgccagtgccagcgactggtaaaagtggttgatatcgatgagcaaatttacgcgcgcctgcgcaataacagccgggataaattagtcggcgtaagaaagacgccgcgtattcctgccgttccgctcacggaacttaaccgcgagcagaagtggcagatgatgttgtcaaagagtatgcgtcgttaatgtcatttcgttgataccgtgcgacctggtcgctggatgcgatgctggcgcatcttatccggcctacggttgctttacagccaggtcggataaggcgtttatgccgcatccgacgatgttaccgtttcggcgtcacatccgtcgtcccctgcaaacgggggcgattttcctccatttgcctcagtggctgcgtttcatgtaacgctgcatgacagcgcccgacaagatcctgatactctttggtattcaaccgtttccagtgtaactcgtcgtcactcacgctgcgtacagcgcgggctggcgtacccatcaacaactggcgtttctcgccgcgaaagcccgctttgacaaagctcatagcggcaacaatgctctcttcgccaatgaccgcgccatccataatcacgctgttcatcccgaccagtgcatcgcgaccaatcacacaaccatgcaggatcgctccgtgcccgatatgaccgttttccccaacgatggtgtcagtgtcgcagtagccatgcataatgcagccatcctgaatattggctcccgcttgcacgatcaaccgcccgtagtcaccacgcagtgaggcgagtgggccgatgtagacaccggctcccacaatcacatcgccaatcaatactgcactgggatggacaaacgccgtcgggtgaacaaccggaattaacccctcaaaggcgtaatagctcacggttgttaacgtcctttccacactggatcgcgcttctcggcaaacgccagcggcccttcaatggcatcctccgaatgcagaaccgacggatagtgtttcaacacgccgctgcgaatatagcgatacgcttcttctaccggcatttcactggtggtgcggtagatctctttcagcgccgcaatcgccagcggagcgctgttaaccagctgctgcgccagttcgcgggcgttatccatcagttccgcctggctaaccacgcggttgactaccccccaacgcagcgcctcttctgcgcccattcgtctgccggtcatcaccatttcattgacgatggcaggcggcaggatcttcggcagacgcagcacgccgccgctgtcaggaacgatgcccagtttggcttccggtagggcgaagctggcgttatcggcacaaacaataaaatctgccgccagcgccagttcaaagccgccgccaaaggcatagccgttcacagcggcgatgaccggtttgtcgagattgaaaatttcggttaatcccgcaaaacctcccgggccaaagtcagcatccggtgcttcgccttctgctgccgcttttaaatcccagcccgcggaaaagaatttctctccggcaccggtaataatggcgacacgtaattgcggatcgtcacggaaatttagaaatacttcgcccatttcaaagctggtttttgcatcaatagcattcgcttttggacgatcaagggtaatttccagaattgatccattgcgggtcagatgtaatgattcactcattccttttctccatttttgctttttcagggacgacaacatccctgcaaaaaatgcatattgttttagagcgtgattattagctgacagggtagttccctgccgtttcatttatttcagattctttctaattattttccccgagcaattacgtggcagatcttttctgatctccagataagagggcactttaaatttcgccatattctgttcacagaagcagaagaattcctcttcgctcaatgtttcaccttcattcagcaccacaaatgctttgatggcttcatcgcgaatcgaatctttaatacccacaaccacgatatcctgaattttgggatgggtggcgatgatattttcgagctccacgcaggagacattctcgccaccgcgtttgatcatattgcagcggcgatcgacgaaataaaaaaagccctcttcgtcgcggtatccggtatcgccggtatgtagccagccatcggcttccagcactttcgcagtggctttcgggttgagaaaatactctttgaagatggttttccctggtacgcctttaatacagatttcaccgagctcaccagccgggaggggacgattgtgatcgtcgcggatctccgcttcgtagcaaaagcccgcccgaccaatcgacggccagcgccgtttatcgccagggcgatcgccgataatgcccacaatggtttccgtcatcccataagacgtcagcaagcgaacgctgaagcgttcacaaaacgcgtctttttcctgctccgacaggttgagataaaacatcacttcccgcaggcggtgttgctgatcgttcgctgaaagcggctgcaccatcaacgtacgaatcatcatcggaatacattcggtaatggtggcgcggtacttctgcacctgtccccagaaggcgcgggcgctgtatttctcgaccagcacaaaggtggccccggcagaaaacgccgccatcgccgcagtacactggcaatcgatatgaaacgcaggcattaccgtcaggtagacgtcatcgtcacgcagtgcacactgccaggcggagtaatatccagcgaagcgcaggttgtaatgagttatcaccacccctttcggtcgggaggtggtgccggaggtgaagagaatttccgccgtatcgtcagtcgatagcggcggtgcatagcacaaggtggcaggttgttgatttttcagttgagtaaacgaactcacgccatcatcagcgggaagtaccatatctgtcaggcaaatgtgccgcaactgagaggcatcttcctgctgaatctgttgatacataggataaaattgcgcactggtcaccagcaggcacgcctggctattttgcaggatccacgtgctttcttcgcgcaacaggcgggcgttaatcggcaccataatcgcgccaatttttgccaacccgaaccagcaaaagataaattccgggcagttgtcgagatgtagagcaaccttgtcgcctttgcgaatccccagcgtataaaacaggtttgccgtgcggttaatctcctgatttaactcaagataactataccggttaacgactccgctgctggattcacaaatcagcgccgttttatgaccgtaaacgtccgccagatcgtcccacatttgacgtagatgttgtccgccaatgatatccattgcacctctatccattttgttcgtttgttattgggcgggcgctagtcaggcaagttgactgacgccacgcgtttagtcctcaactttggccagacctttgctgaccaactcctgaatgtcgttttcgctgtagccgatatttttcaaaatggcagccgtgtccatgccatgtgagggcattccgcgccagatttgtccggggttatttttgaatttcggcatgatattcggccctttgcaggtgcgaccatccatcgtttgccactgagtgattgattcgcgagccacatactgtggattgctttccagttccggtacggtaagtactttggcacaggcgatattcagttcggcaaagcgttctttaacttctgcgatggtatgtgccgccagccaggcatcgagtttctcttctaccagtgggccgtaagggcattcgatacggtgtataagttgagtgccttccggaatttctggcgtgccgagcagatgcgcgaggccaatatctttaaagcactctgcaatttgagtaatgcccaccagttccatcacgatgtagccgtcggcgcatttatacagaccgcaaccggcgtagtagggatctttacctttggtcatgcgcgggcacatttcgccgccgttgaagtaatccatcatgaagtactggcccatgcgcaacatcacttcatacatggcgatgtcgatgctttcgcctttgccggtttcacgcactttatgcagtgctgcaagcgccgccgtggtggcggtcaggccagaaaagtaatcggcggtatacgggaaggcaggcattggctggtcaacatcaccgttctgaatcaggtaaccactgaaggcctgggcgatagtgttataggccggaagattggtgtactcctcggtgccatactgaccaaaaccggaaaggtgagcgataaccagttttgggttgtgctgccacaggacttcatcggtaatgccacgacgggcaaaggccggacctttactggcttcgatgaagatatcggtggtttccattaatttcagaaacgcttcgcgcccttcatctttgaaaatatttaacgacagcgcatgcaaattgcggcgggagagctgcgggtagttcggttgaacgcgaatggtgtcggcccaggcgacgttctcgatccagataacttccgccccccattctgcgaacatttgtccggcgaacggcccggcgatttcgataccggagaagacaacgcgtaatccggccagcggcccgaatttcggcatgggtagatgatccattattagctcctgaaaaatttatgtagcgcatgactgccggatgcggcgtaaacgccttatccggccatcttcgtgctcccgtaggcctgataagacgcgtcagcgtcgcatcaggcagcgcacggacttaacggtattgcttcagcaccgcgcgacccagcgtcaggatctgcatttcgtcagatcctccggaaacgcggtctacacgcaggtcacgccagaagcggctgatgcggtggttgcccgcaatcccgacaccgcccagcacctgcattgcgctatccaccacttcaaatgccgcattggcgcagaagtatttgcacatcgctgcatcgccagaggtgatggtgccgttgtctgctttccacgctgcttcatacagcatgtttttcatggagtttaatttgatcgccatgtgggcgaatttttcctgaatcaactggaaacgaccaatagcctcgccaaactgcacgcgctggttggcgtagcgcgccgcatcttcaaaggcgcacatcgccgtaccgtagttggtcagggctaccaggaaacgttcatggtcgaactcttctttgacgcggttaaagccgttaccttcccgaccgaacatgtctttctcgtccagttccacgtcgtcaaaagtgatttcacagcagctatccatacgcagaccgagcttttcaagtttggtcactttgatgcccggtttgctcatatcaacaaaccattcggtgtagacaggtttgtccggagaagccccgtcgcgcgccatcaccacgatgtacggggtgtaggcgctactggtaataaaacacttactaccattaagataaatcttaccatttctacgggtataagtcgttttcaggctacccacgtcggagcctgcgcccggttcggtaatcgctgagttccacatctgcttaccggtgccgcggaaagccatgatcttgtcgatctgctcttgcgtaccttcacgcaggaaggtgttaaacccgcccggtaactgatacagcacgtaagttggcgctcccagacgacccagttccatccacacggcggcgagagtaacaaaccccgcgtccagaccaccgtgctcttcagggatcagcagactgtcgatacccatatccgccagggctttgacaaaacgttccgggtagacgctgtcacggtcgcactcggcaaaataggcttcccagttttcgctggccatcagttcgcggataccggcgacaaacagttcctgctcatcatttaaattaaaatccatctttcaacctcttgatattttgggggttaattaatctttccagttctgtttcgcgtctttaataaaggagagcgtcaccatgatgttgacgaagaacagcgggcatcctccggcgataatggcggtttgaatcggtttcaggccgccgagcgccagcagaacaataccgataatgccaaccagaactgaccaaccaatgcgcaccagcagcgggggttcttcgccgtcacgcacttcgcggcaagtggacatcgccagggtataagagcaggcgttaaccagcgtaacggtggcaataaagcagaggatgaagaagccccacatggtggcggtgctgagtggcagagcggcccaggtttcgatgatggcgcgcgccacaccgtactgttcgatcagatttggaatgttgatgatgtttttatctatcaacagcagagtgttactaccgagtacagtccacaggatccatgttgacgctgtcagccccagcaccatgccgaagcacagttcacgcacggtacgaccacgggagatgcgggcgaggaagatactcatctggatagcgtaaatcacccaccatgcccagtagaacacggtccagccctgcgggaagccgcctttagcgatgggatcggtatagaacaacatgcgcggcagatacatcagcaacatccccaccgaatcggtgaagtagttcatgatgaagctggcaccgctgacgatgaacacccaacccagcatcaggaagctcaggtaactacgcacgtcactggcgatacgtacccctttttgcagaccgcaagcgacgcaaatggcgttgaggataatccagcaggtaatgatgatagcgtccagttgcagggtatgcggaatgccaaacaaccattgcatacactcggtcaccagcggcgtggcaaggcccagactggtacccatcgcgaagatcaaggcgacgagatagaagttgtcgacgatagtgccgaacaaccctttggcgtgtttttcacctaccagcggcaccagggtggagctggggcgaatcacttccattttgcggacaaagaagaagtaagcgaaggcgactgaaaggaagctgtaagtggcccacggcagaggtccccagtggaacaagctgtaagccagccccaactctttcgcgcctgttgagttcggttctaagccaaacggcggggtggagatgtagtagtagatctcaatcgatccccagaacagtacggcagcagacgtacaggaggcgaacatcataaagatccaactggcggtactaaattctggtggttcgttacctaaacgctttttggcatacgggccaaacaccagccagaaccagccgaaaagcatcaccaccatataccattcaaatgcccatccccatacattggtgacgtaactgaatacagcattaataacgacattcgccgcatccagatctctgactgtaagccaacaaagtatgccgacgattattaacggcggaaagaaaaccttcggttctattcccgtttttctcttttcattcttcatgagttaattccactgtgaaaacgaacatttattttgcgttcccgtttgttttatttttgttaacatttaatataattattattaacctcgtggacgcgttaatggctaactcataatgggtattcaataagctgcattctgtgattgttatcacatttttgtttcgggtgaatagagggcattttttcgttaattttgattattaatcagtttgttatgttctgttgtgagtaaaaaaatagcatctgactttcaatattggtgatccataaaacaatattgaaaatttcttttttctacgccatgttttcaatattggtgaggagcttaacaatattgaaagttggatttatctgcgtgtgacattttcaatattggtgattaaagttttatttccaaattaaagggcgtgatatctgtaattaacaccaccgatatgaacgacgtttccttcatgatttctggagatgcaatgaagattattacttgctataagtgcgtgcctgatgaacaggatattgcggtcaataatgctgatggttcgttagacttcagcaaagccgatgccaaaataagccaatacgatctcaacgctattgaagcggcttgccagctaaagcaacaggcagcagaggcgcaggtgacggccttaagtgtgggcggtaaagccctgaccaacgccaaagggcgtaaagatgtgctatcgcgcggtccggatgaactgattgtggtgattgatgaccagttcgagcaggcactgccgcaacaaacggcgagcgtactggctgcagccgctcagaaagcaggctttgatttgatcctctgtggcgatggttcttccgacctttatgcccagcaggttggtttgctggtaggcgaaatccttaatattccggcagttaacggcgtcagcaaaattatctccctgactgcagataccctcaccgttgagcgcgaactggaagatgaaacagaaaccttaagcattccgctgcctgcggttgttgctgtttccactgatatcaactccccacaaattccttcgatgaaagccattctcggcgcggcgaaaaagccagtccaggtatggtcggcggcggatatcggttttaacgcagaggcagcctggtcagaacaacaggttgccgcgccgaaacagcgcgagcgtcagcgcatcgtgattgaaggcgacggcgaagaacagatcgccgcatttgctgaaaatcttcgcaaagtcatttaattacaggggatgctatgaacacgttttctcaagtctgggtattcagcgataccccttctcgtctgccggaactgatgaacggtgcgcaggctttagctaatcaaatcaacacgttcgtcctcaatgatgccgacggcgcacaggcaatccagctcggcgctaatcatgtctggaaattaagcggcaaaccggacgatcggatgatcgaagattacgccgatgtcatggctgacactattcgccagcacggcgcagacggtctggtgctgttgccaaacacccgtcgcggcaaattactggcggcgaaactgggttaccgccttaacgcggcggtgtctaacgatgccagcgctgttagcgtgcaggacggtaaagcgacagtgaaacacatggtttacggcggtctggcgattggcgaagaacgcattgccacgccgtatgcggtactgaccatcagcagcggcacgttcgatgtggctcagccagacgcgtcacgcactggcgaaacgcacaccgtggagtggcaggctccggctgtggcgattacccgcacggcaacccaggcgcgtcagagcaacagcgtcgatctcgacaaagcccgcctggtggtcagcgttggtcgcggtattggcagcaaagagaacattgcgctggcagaacagctttgcaaggcgataggtgcggagttggcctgttctcgtccggtggcggaaaacgaaaaatggatggagcacgaacgctatgtcggtatctccaacctgatgctgaaacctgaactgtacctggcggtggggatctccgggcagatccagcacatggttggcgctaatgcgtcgcaaaccattttcgccatcaacaaagataaaaatgcgccgatcttccagttcgcggattacggcattgttggcgacgccgtgaagatccttccggcactgaccgcagctttagcgcgttgatccactctggcagggagctcttatgtccgaagatatctttgacgccatcatcgtcggtgcagggcttgccggttcggttgccgcactagtgctcgcccgcgaaggtgcgcaagtgttagttatcgagcgaggcaattccgcaggtgccaagaacgtcaccggcgggcgtctctatgcccacagtctggaacacattattcctggtttcgctgactccgcccccgtagaacgcctgatcacccatgaaaaactcgcgtttatgacggaaaagtcagcgatgactatggactactgcaatggcgacgaaacctcgccatcccagcgttcttactccgttttgcgcagtaaatttgatgcctggctgatggagcaggctgaagaagcgggcgcgcagttaattaccgggatccgcgtcgataacctcgtacagcgcgatggcaaagtcgtcggtgtagaagccgatggcgatgtgattgaagcgaaaacggtgatccttgctgatggggtgaattccatccttgccgaaaagctggggatggcaaaacgcgttaaaccgacggatgtggcggttggcgtaaaggaactgatcgagttaccgaagtcggttatcgaagaccgttttcagttgcagggtaatcagggcgcggcttgcctgtttgcgggatcacccaccgatggcctgatgggcggtggcttcctttataccaatgaaaataccctgtcgcttgggctggtttgtggtttgcatcatctgcatgacgcaaaaaaatcggtgccgcaaatgctggaagatttcaaacaacatccggccgttgcaccgctgatcgcgggcggcaagctggtggaatattccgctcacgtagtgccggaagcaggtatcaacatgctgccggagttggttggtgacggcgtattgattgccggtgatgctgccggaatgtgtatgaacctcggttttaccattcgcggtatggatctggcgattgccgccggggaagcagcagcaaaaactgtgctttcagcgatgaaaagcgacgatttcagtaagcaaaaactcgcggaatatcgtcagcatcttgagagtggcccgctgcgcgatatgcgcatgtaccagaaactaccggcgttccttgataacccacgcatgtttagcggctacccggaactggcggtgggcgtggcgcgtgacctgttcaccattgacggcagtgcgccggaactgatgcgcaagaaaatcctccgccacggcaagaaagtgggcttcatcaatctgatcaaggatggcatgaaaggagtgaccgttttatgacttctcccgtcaatgtggacgtcaaactgggcgtcaataaattcaatgtcgatgaagagcatccgcacatcgttgtgaaggccgatgctgataaacaggccctggagctgctggtgaaagcgtgccccgcaggtctgtacaagaagcaggatgacggcagtgtgcgcttcgattacgccggatgtctggagtgcggcacctgtcgcattctggggctggggtcggcgctggaacagtgggaatacccgcgcggcacctttggtgtggagttccgttacggctgatgttggtttgatacgtaatgccgtactgactctcattgcaaaaaaacaggaataacccatgcaaccgtccagaaactttgatgatcttaaattctcctctattcaccgccgcattttgctgtggggaagcggtggtccgtttctggatggttatgtactggtaatgattggcgtggcgctggagcaactgactccggcgctgaaactggacgctgactggattggcttgctgggcgcgggaacgctcgccgggctgttcgttggcacatcgctgtttggctatatctccgataaagtcggacggcgcaaaatgttcctcattgatatcatcgccatcggcgtgatatcggtggcgacgatgtttgtctcatcccccgtcgaactgttggtgatgcgggtacttatcggcattgttatcggtgcggattatcccatcgccacctcaatgatcaccgagttctccagtacccgtcagcgggcgttttccatcagctttatcgccgcgatgtggtatgtcggcgcgacctgcgccgatttggtcggctattggctttatgatgtggaaggcggctggcgctggatgctgggtagcgcagcgattccctgtttattgattttgattggtcgattcgaactgcctgaatctccccgctggttgttacgcaaagggcgagtaaaagagtgcgaagagatgatgataaaactgtttggcgaaccggtggctttcgaggaagagcagccgcagcaaacccgttttcgcgatctgtttaatcgccgccattttccttttgttctgtttgttgccgccatctggacctgccaggtgatcccaatgttcgccatttacacctttggcccgcaaatcgttggtttgttaggattgggggttggcaaaaacgcggcgctggggaacgtggtgattagcctgttctttatgctcggctgtattccgccgatgctgtggctaaacactgccggacggcgtccattgttgattggcagctttgccatgatgacgctggcgctggcggttttggggctgatcccggatatggggatctggctggtagtgatggcctttgcggtgtatgcctttttctctggcgggccgggtaatttgcagtggctctatcctaatgaactcttcccgacggatatccgcgcctctgccgtgggcgtgattatgtccttaagccgtattggcactattgtatcgacctgggcactgccgatctttatcaataattacggtatcagtaacacgatgctaatgggggcgggtatctcgctgtttggcttgttgatttccgtagcgtttgccccggagactcgagggatgtcactggcgcagaccagcaatatgacgatccgcgggcagagaatggggtaatttgttcagatttctctcttttctgaatcaatattattgactataagctgcgtgaatatatgactacactttgtgggaaaacaaaggcgtaatcacgcgggctacctatgattcttataatttatgcgcatccatatccgcatcattcccatgcgaataaacggatgcttgaacaggcaaggacgctggaaggcgtcgaaattcgctctctttatcaactctatcctgacttcaatatcgacattgccgccgaacaggaggcgctgtctcgtgccgatctgatcgtctggcagcacccaatgcagtggtacagcattcctccgcttcttaaactttggatcgataaagttttctcgcacggctgggcttacggtcacggcggcacggcgctgcacggcaaacatttgctgtgggcggtgacgaccggcggcggggaaagccattttgagattggtgcgcatccggggtttgatgtgctgtcgcagccgctacaggcgacggcaatctactgcgggctgaactggctgccaccgtttgccatgcactgcacctttatttgtgacgacgaaaccctcgaagggcaggcgcggcactataagcaacgtctgctggaatggcaggaggcacatcatggatagccatacgcttattcaggcgctgatttatctcggttcggcggcgctgattgttcccattgcggtacgtctcggtctgggatcggttcttggctacctgatcgccggctgcattattggcccgtgggggctgcgactggtgaccgatgccgaatctattctgcactttgcagagattggcgtggtgctgatgctgtttattatcggcctcgaactcgatccacaaaggctgtggaagctgcgtgcggcagtgttcggcggtggcgcattgcagatggtgatttgcggcggcctgctggggctgttttgtatgttacttgggctgcgctggcaggtcgcagaattgatcggcatgacgctggcgctctcctctacggcgattgccatgcaggcgatgaatgaacgcaatctgatggtgacgcaaatgggccgcagtgcctttgcggtgctgctgttccaggatatcgcggcgatcccgctggtggcgatgatcccgctactggcagcgagcagtgcctcgacgacgatgggcgcatttgttctctcggcgttaaaagtggcgggcgcgctggcgctggtggtattgctggggcgctatgtcacgcgtccggcactgcgttttgttgcccgctctggcttgcgggaagtgtttagtgccgtggcgttattcctcgtgtttggctttggtttgctgctggaagaggtcggcttgtcgatggcgatgggcgcgtttctggcgggcgtactgctggcaagctcggaataccgtcatgcgctggaaagcgatatcgaaccatttaaaggtttgctgctggggctgtttttcatcggcgttggcatgtcgatagactttggcacgctgcttgaaaatccgttgcgcattgttattttgctgctcggcttcctcatcatcaaaatcgccatgctgtggctgattgcccgaccgttgcaggtgccaaataaacagcgtcgctggtttgcggtgctgttaggacagggcagtgagtttgcctttgtagtatttggtgcggcgcagatggcgaatgtgctggagccagagtgggcgaaatcgctgactctggcggtggcactgtcgatggcggcaacgccgattctgctggtgatcctcaatcgccttgagcaatcttctactgaagaggcgcgtgaagccgatgagatcgacgaagaacagccgcgggtaatcattgccggattcgggcgttttgggcagataaccggacgtttactgctctccagcggggtgaaaatggtggtgctcgatcacgacccggaccatatcgaaacgctgcgtaaattcggtatgaaagtgttttatggtgatgccacgcggatggatttactggaatctgccggagcggcgaaagcggaagtgctgattaacgccatcgacgatccgcaaaccaacctgcaactgacagagatggtgaaagaacatttcccacatttgcagattattgcccgcgcccgcgatgtcgaccactacattcgtttgcgtcaggcaggcgttgaaaagccggagcgtgaaaccttcgaaggtgcgctgaaaaccgggcgtctggcactggaaagtttaggtctggggccgtatgaagcgcgagaacgtgccgatgtgttccgccgctttaatattcagatggtggaagagatggcaatggttgagaacgacaccaaagcccgtgcggcggtctataaacgcaccagcgcgatgttaagtgagatcattaccgaagaccgtgaacatctgtcattaattcaacgacatggctggcagggaaccgaagaagggaaacatactggcaatatggcggatgaaccggaaacgaagccctcatcctaataaagagtgacgtaaatcacgctttacagctaactgtttgtttttgtttcattgtaatgcggcgagtccagggagagagcgtggactcgccagcagaatataaaattttcctcaacatcatcctcgcaccagtcgacgacggtttacgctttacgtatagtggcgacaattttttttatcgggaaatctcaatgatcagtctgattgcggcgttagcggtagatcgcgttatcggcatggaaaacgccatgccgtggaacctgcctgccgatctcgcctggtttaaacgcaacactttaaataaacccgtgattatgggccgccatacctgggaatccatcggtcgtccgttgccaggacgcaaaaatattatcctcagcagtcaaccgggtacggacgatcgcgtaacgtgggtgaagtcggtggatgaagccattgcggcgtgtggtgacgtaccagaaatcatggtgattggcggcggtcgcgtttatgagcagttcctgccgaaagcgcaaaaactgtatctgacgcatatcgacgcggaagtggaaggcgacacccatttcccggattacgagccggatgactgggaatcggtattcagcgaattccacgatgccgatgcgcagaactctcacagctattgctttgagattctggagcggcggtaattttgtatattagaattccggcatcactgatacgtgcagatatccgtgtatactagacgtataaattgtacaggagcacgagatcatgactgcaaaacgtaccacacaaagtgtgaccgtcaccgtcgaccgtgagttagtcaatcgcgctcgtgatgcaggcttaaatatgagcgccacccttacggttgcgctcaatgctgaacttaaaaaacatgcagcaacacgttggcgtgaagagaacgcagaagctatcgctgcgttaaatcaattggctgatgaaaccggatgtttctctgatgagtaccggagcttctagcgatgcaatttacggtataccgcagtcgcggcaggaacgccgcgtttccctttgttattgatgttaccagcgacattattggtgagattaatcgccgtatcgttattccattaacacctattgaacgatttagccgtattcgcccaccagaacggcttaacccaatccttttactggtagacggcaaagaatatgtgctcatgacgcatgagactgcaactgttccagttaacgcgctgggaacgaaattttgcgatgccagcgcgcaccgaacgttgattaaaggagcattagattttatgctcgacgggatttaagacgctaccgcctctccctcacccatatctttatgccggttcgacggctggacaaaatactgtttatcttcccagcgcaggcaggttaatgtaccaccccagcagcagccggtatccagcgcgtaaataccttccggcgtacctttgccttccagcgatgcccagtgaccaaaggcgatgttgtactcttcagcgacggggccaggaatcgcaaaccacggtttcagtggggcaggggcctcttccggcgattctttgctgtacatatccagttgaccgtttggaaagcaaaagcgcatacgggtaaaggcgttggtgataaaacgcagtcttcccagcccccgcaattccggtgaccagttatttggcatatcgccgtacatggcatcaaggaagaagggataggagtcactcgacagcaccgcttctacatcgcgcgcgcactctttggcggtctgcagatcccactgcggcgtgatcccggcgtgggccatcaccaactttttctcttcgtcgatttgcagcaaaggctggcgacgcagccagttaagcagctcgtcggcatccggcgcttccagcagcggtgtcaggcgatctttcggtttattgcggctgatcccggcaaataccgccagcagatgcagatcgtgattacccagcaccagacgtacgctgtcgcctaaggatttcacatagcgcagaacatccagcgaacccgggccgcgcgcgaccagatcgcccgtcagccagagggtatctttcccaggggtaaattctactttatgcagcaatgcgatcagttcatcgtaacaaccatgaacgtcgccaataaggtatgtcgccatattcttttaatgaatgagtgtgggaacggcgagtcggaatacgggaatgtcgatgctgaaagggacgccattttcatcgatcatttcgtagtgaccctgcatggtgcccagcggggtttcaatgattgcaccgctggtgtactggtactcttcgccaggcgcgataagtggctggacgccaaccactccttcgccctggacttcggtttcacggccattgccattggtgatcagccagtaacgccccaacaactgcactggcgctcgccccagattgcgtatggttacggtataagcaaaaacgtaacgttcattatcaggtgaagattgggcctcaatgtagacgctttgaacctgaatacacactcggggcgaattgatcatcgttaactctcctgcaaaggcgcgttctccgccagatagttcgccatctggcaatattgcgcgacagagatattttccgctcgcatcgccgggtcgatccccattcccgttaacacctcgacgctaaacaggttgccgaggctgttacgaatggttttacgacgctggttaaaggcttcagtggtgatgcggctcaacacgcgaacatctttaaccgggtgaggcatcgttgcatgaggaaccaggcgcacgacggcggaatccactttgggtggtggtgtaaaggctgacggcggtacttccagcaccgggatcacgttgcaatagtattgcgccatgacgcttaatcgaccatacgccttgctgttcggtcctgcaaccagacgattcaccacttctttttgcaacataaagtgcatgtcggcaatggcatcagtatagctaaacagatggaacatcaacggcgtggagatgttataaggcaggttgccgaaaacacgcagcggctggcccattttcgcggccagttcgccaaagttaaaggtcatcgcatcctgctgataaatcgtcagtttcgggcctaagaatggatgcgtttgcagacgtgccgccagatcgcggtcaagttcgatgaccgtcagctggtccagacgttcgccgaccggttcggtcaatgccgccagaccggggccgatttcgaccatcgcctggcccttctgcgggttaatggcagaaacaatgctgtcgatcacgaactgatcgttgagaaagttttgcccgaagcgtttacgggctaagtggccctggtggactcgattattcattgggtgttaacaatcattttgatggcgagattaagcgccgtaataaaactgccgacatcggctttaccacgtcccgccagttcaagcgcggtgccgtggtccactgatgtgcgaataaagggcaggcccagcgtaatgttcacaccgcgcccgaagccctggtattttagcacgggaagaccctgatcgtggtacatcgccagcacggcgtcggcgttatcgagatatttcggctgaaacagggtatcggcaggcagcggcccgttgagtttcatcccctgttcccgcagctcgttgagtaccggaataatggtgtctatctcttccgtacccatatgaccgccttcgcccgcgtgcggattcagcccgcagaccagaatgcgcggttcggcaataccaaatttggtgcgcaaatcgtgatgcaaaatagcaatcacttcgtgcaaaagggcaggggtgatagcatctgcgatatcgcgcagcggtaaatgcgtcgttgccagcgccacgcgaagttcttcggtcgccagcatcatcaccacttttttcgcctgcgaacgctcttcgaaaaactcggtatgaccggtaaacggaatgcctgcgtcgttaatgacgcctttatgcacggggcctgtgatcagcgcagcaaattcaccgttcagacagccatcacacgctcgcgccagcgtttccaccacatagtgcccattttcaactgctaactgccccacagtgacagattcacgtagcgcgacaggaagtagcgttaatgtgcccgcagtttgcggttgtgcaggggagttgggggaataagggcggagggtgagcggcaaaccgagcatcgctgcccggtcggtaaggagagtggcatcggcacaaacaaccagttcgactggccactcacgctgtgcaagctggacaattaagtccgggccaatcccggcgggctcgccgggagtgatcacaacacgttgggttttaaccattagttgctcaggattttaacgtaggcgctggcacgttgttcctgcatccagcttgctgcttcttccgagaacttacggttcatcagcatgcggtatgcacgatctttctgtgccgcgtcggttttatcgacattacgggtatccagcagttcgattaaatgccagccgaatgaagagtgaaccggtgcactcatttgacctttgttcaggcgggtcagggcgtcacggaaggccggatcgaaaatatctggtgtagcccagccgagatcaccgccctggttagcagagcctggatcctgagagaactctttcgctgcggcagcaaaagtcgttttaccactcttgatatcggcagcaatctgttccagtttcacgcgggcctgttcgtcagtcatgatcggcgacggtttcagcagaatatggcgagcatgaacttcggtcaccgagatatttttgctttcgccgcgcaggtcgttaactttcagaatatggaagccaacgccggaacgaatcgggccaacaatgtcgcctttcttcgcggtgcttaatgcctgggcgaagatccccggcaactcctgaatacggccccagcccatctgtccgccgttcagcgcctgctggtcggcagaatgagcaatcgccagcttaccgaaatcagcgccgttacgcgcctgatcgacaatcgcgcgcgcctggctttccgcttcgttcacctgatcagaggtcgggttttccggcagtgggatcaggatgtggctcaggttcagctcagtgctggcgtcgttttggttacccacttgctgcgccagggattcgacttcctgcggcaggatggtgatgcgacgacgcacctcgttgttacgcacttcagagataatcatctctttgcggatctggttacgataggtgttgtagttcagaccatcgtaagccagacggctgcgcatctgatccagcgtcatgttgttctgtttcgcgatgttagcaatcgcctgatccagctgctcatcggagattttcactcccattttctgccccatctgcaggatgatttgatccatgatcaaacgctccatgatttggtggcgcagcgtcgcgtcatcaggaagttgttgccttgcctgagcagcgttcagttttaccgactgcattaatccatcaacgtcgctttccagcacgacgccgttattgacgacggctgcgactttatcgactacctggggggcagcgaaactggtattcgcgatcatggcgataccgagaagcagcgttttccagttcttcatactttttccatttcaattaaccgcactgcggattacgtggtaaatcaacaaatcacaaagtgttttgatacggcagaatgttcgaacgcagcatctcttgcgtacccagaccgtagttggagctcaggccgcgaagttcgatgttaaagccgattgcgttgtcatataccgcatgttgtttatcgttatcccaaccgttcagcttccgctcgtaaccgacgcgaatcgcatagcagcaggagctgtattgcacacctaacatagagtcggcttgcttgttcgcattggtgtcgtagtagtaggccccaacaatggaccaacgatcggcaattggccagctggcgacggctcctacctgcgaaataccattcttatattgctcagcagtggaatagtacttaggcagcgttgcctgaatatattccgggctggcgtaacggtaattcagctgtaccagacggtcttcatcccgacggtattcaatgctggagttactggtcgctacgttatccagacgtgtatcgtactgaatcccgccacgcaatccccaacgatcagagatgcgccagtaagtatcgcctgcccataccagtgagcccgttttgtcgtcattctcccatgttatgttgtcatcgccagtgcgagactccgtgaaatagtagatttgaccaacggaaatattaaaacgttcaacggcagcatcatcatatatgcgagatgtgacaccggtcgtcacctggttagcggaggcaatacggtcaagaccgccgtaagtccggtcccggaacaggccggagtagtcagattgcagcagagacgagtcgtagttatagattttgctctgatcgcgatatggcacatacagatactgcgcgcgtggttccagtgtctgggtatagcccggcgccagcatttccatatcacgctcgaagaccattctaccgtctaccttgaactgcggcattacacggttagcggactctgccagcttggtcgtgtttctggagttataccagtcaagattggtttgctgataatgggttgccagcaacttcgcttcagtattgatgctgccccagttattagagagcggcagattgatggtcggttccaggtgaacacgagtcgcctctggcatgtcatctctggtgttaacaaagtgcactgcctggccgtaaatacgcgtatcaaacggaccaacatcattctggtagtagttaacgtctaactgcggctctgccgagtagctactggtgttctgctcgctgaagacctggaactgcttggttgaaacggtggcattgaagttttgcaccgcatagccaacgctgaatttttgcgttgcgtagccgtcggtactggaaccgtatttgttatcgaagtcattgaagtagctaggatcgctgactttggtgtagtcgacgttgaaacgccacacctgatccatgaccccggagtggttccagtagaacaaccaacgacgtgaactgtcatcgttcgggtgttcatctttatagactttatctgaaggcagatagtccagttccatcaagccagcgcccgcctgggagaggtagcggaattcgttctcccacatgatgttgccacgacgatgcatataatgcggcgtgatggtggcatccatatttggcgcgatgttccagtaatatggcaggtagaactcaaagtagttggtggtggtgtatttggcgttcgggatcaagaaaccagagcgacgtttgtcacccaccggcaactgcaaatacgggctataaaagatcggtaccggacccaccttaaagcgggcgttccagatctccgcaacttgttcttcgcggtcatgaataatttcgctacctaccacgctccaggtgtcagaacccggcagacaggaggtaaagctaccgttatccagaatggtatagcggttttcgccacgttgtttcatcaggtccgctttaccgcgaccctggcgacccaccatctggtaatcaccctcccagacgttggtatctttggtgttcagattcgcccagcctttcggccctttgaggatcacctggttatcgtcgtaatggacattaccgagcgcatcaacggtacgtaccggctccggttgtcctggtgcctctttttgatggagctgcacttcgtcggcctgcagacggctgttaccctgcatgatatccacgctgccagtaaacacggcgtcatccgggtagtcccctttcgcgtggtcagcattgatagtcacgggtaagtcattggtatcgccctgtaccagaggacggtcatagcttggcacgcccaacatgcactgtgaggcgaggtcggctgccagtccctgttgactataaagggcggtggcaatcatggtggccaggagagtggggatacgttttttcatacgttgattttattgttccatcatcggtaacgttgcgcgtgacaaacggtcagagactaacgtactcgtcatctctacgctagtgttaatcctgtccgaatagcgtctgtggtgttaggcacggcattgaatgacaggtatgataatgcaaattataggcgatgtctcacaatagaccgcagccagaaatgggtaaaagcgcctttatattgtgggagatagccctgatatccgtgtgtcgatttggggaatatatgcagtattggggaaaaatcattggcgtggccgtggccttaataatgggcggcggcttttggggcgtagtattgggcctgttaattggccatatgtttgataaagcccgtagccgtaaaatggcgtggttcgccaaccagcgtgagcgtcaggcgctgttttttgccaccacttttgaagtgatggggcatttaaccaaatccaaaggtcgcgtcacggaagctgatattcatatcgccagccagttgatggaccgaatgaaccttcatggcgcttcccgtactgcggcgcaaaatgcgttccgggtgggaaaatcagacaattacccgctgcgcgaaaagatgcgccagtttcgcagtgtctgctttggtcgttttgacttaattcgtatgtttctggagatccagattcaggcggcgtttgctgatggttcactgcacccgaatgaacgggcggtgctgtatgtcattgctgaagaattagggatctcccgcgctcagtttgaccagtttttgcgcatgatgcagggcggtgcacagtttggcggcggttatcagcagcaatctggcggtggtaactggcagcaagcgcagcgtggcccgacgctggaagatgcctgtaatgtgctgggcgtgaagccgacggatgatgcgaccaccatcaaacgtgcctaccgtaagctgatgagtgaacaccatcccgataagttggtggcgaaaggtttgccgccagagatgatggagatggcgaagcagaaagcgcaggaaattcagcaggcctatgagctgataaagcagcagaaagggtttaaataagtttcaacgtgtaggcctgataagacgcggcccgcgtcgcatcaggcaatcggcgcaaaattgccggatgcggcgtgaacgccttctccggcctaccgaacttcgccagcgtgactattaaaaatccgctggtgctttaaatgtcatactattgccatacgccggatgggtaatcgtcagcatctctgcatgtagcaacaaacgtggtgccattgctctcgcttctggtgatgcataaaaacgatcgccgagaatcggatgacccagcgccagcatatgcacacgcagctgatgcgaacgcccggtaatcggttttaacaccactcttgccgtgttatccgccgcatattccaccacttcatactccgtctgcgcaggtttacctgtttcgtaacagactttctgtttcgggcggtttggccagtcgcaaatcagcggcagatccaccagaccttccgcaggggatggatgcccccagacgcgggccacatactgttttttcggctcgcgctcgcggaactggcgttttaactcccgctccgcggctttggtcagcgccactacaatcacgccgctggtagccatatccagacgatgcaccgattctgcctgcggataatcacgctgaatgcgcgtcatcacgctgtctttgtgctcttccagacgccccggcacagacaacaaaccgctcggcttgttgaccaccataatatggtcatcctgatacaggacaaccagccagggttcctgcggcggattgtagttttccatccccatcttcggctccgttactgatgcgtcacaacgatcaaacgcagggcatccagacgccagcctgcctgatccaggctttccattacctgctgacggttgctctcaatggcggtcagttcgtcgtcacgaatgttcgggttaactgcacgcagcgcttccagacgagacagctcggcagacagtttttcgtcggcttcgttacgcgctgcatcaatcaatgcacgggcagatttctcgatctgcgcttcccccagctgaaggatagcgtgaacatcctgctgcacggcgttaaccagcttgctgccggtgtgacggttaaccgcgttaagctggcggttaaaggtttcaaactctacctgcgccgccaggttgttgccgtttttatccagcagcatacgtaccggcgtcggtggcaggaagcggttgagctgcaactgcttcggagcctgggcttcaaccacataaatcagttccaccaacagcgtacctaccggcaacgctttgtttttcaacagtgaaatcgtgctgctaccggtatcgccagaaaggatcagatccagaccgttgcggatcagcggatgctcccaggtaataaactgtgcatcttcacgcgccagcgccacttcacggtcgaaggtgatggtgatgccatcttccgacaggccagggaagtccggcaccagcatatgatcggacggcgtcagcacgatcatgttgtcgccgcgatcgtcctgattgataccgataatatcgaacaggttcatggcgaaggcgatcaggttggtatcgtcatcctgctcttcaatgctttctgccagtgcctgggctttttcgccaccgttggaatggatttccagcaggcggtcacgaccttgttccagctgtgctttcagcgcttcatgttgctcgcggcagtttttgatcagatcgtcaaagccttcggtctcatccggcgaggccagatagttaatcaaatcgttgtacacgctatcgtagatagtgcgtccggtcgggcaggtgtgctcgaatgcatccagaccttcgtgataccagcgcaccagcaccgactgagccgttttttccagataaggcacatggatctgaatatcgtgcgcctgaccgatacgatccagacgaccaatacgctgctccagcagatccgggttgaatggcaggtcaaacatcaccatgtggctggcgaactggaagttacgtccttcagaaccgatttccgagcacagcagtacctgtgcgccggtgtcttcttcggcaaaccaggcggcagcgcggtcacgttcgataatcgacatgccttcgtggaacactgcggcgcgaataccttcacgttcgcgcagtacctgctccagttgcagcgcagtggccgctttggcgcagatcaccagcactttctgagagcgatggctggtcaggtagcccatcagccactcaacgcgcggatcgaagttccaccaggtggcgttatcgccttcaaattcctgataaatacgctccgggtagagcatatcgcgagcgcgatcttccgcacttttacgtgcgcccataatgccggagactttaatagcggtctgatactgcgtcggcagtggcagcttaatagtatgcagctcgcgtttcgggaagcctttcacaccgttacgggtgttacggaacagcacgcggctggtaccgtggcgatccatcagcatcgaaaccagttcctgacgggcgctctgggcatcttcgctgtcgctgtttgctgcttgcaacagcggctcgatatcctgctcgccgatcatctcaccgagcatgttcagttcgtcattgctgagtttgttaccagccagcagcatggcaacggcgtccgcaaccggacgataatttttctgctcttcaacgaattgcgcaaaatcgtggaaacggttcgggtccagcagacgcagacgggcgaagtggctttccatccccagttgttccggggttgcggtcagcagcagaacgccgggcacgtgctctgccagttgttcaatggcctgatattcacggctcggcgcatcttcgctccacaccaggtgatgcgcttcatcgaccaccagtagatcccattcggcttcacagagatgttccagacgctgtttgctacgacgggcaaaatccagcgagcaaataaccagctgttcggtgtcgaacgggttgtaagcatcgtgctgagcttcggcataacgctcatcatcaaatagcgcaaagcgcaggttgaaacggcgcagcatttctaccagccactgatgctgtaaggtttccgggacgataatcagcacacgttcagcagcgccagagagcagttgctgatgcaggatcatcccggcttcaatggttttccctaaacccacttcgtcagccaacaggacgcgcggcgcgtggcggcgaccaacatcatgagcgatgttgagctgatgggggatcaggctggtacgctgaccgcgcaggccgctgtacggcatacggaactgttcgctggaatacttacgcgcgcgataacgcagcgcaaagcggtccatacggtcaatctgcccggcaaacagacggtcctgcggtttgctgaacaccagtttgctatcaaggaaaacttcacgcagggctacgccggactcttcagtatcaaggcgagtaccgatataggtcagcaagccattttcttcttttacttcttcgacttgcatctgccagccgtcatggctggtaatggtatcaccagggttgaacatcacgcgggtcacgggggaatcactgcgtgcgtacagacggttttcaccagtagatgggaaaagtaaagtgacagttcgcgcatccaccgcgacaacggttccaagtcccaattcgctttctgtatcgctgatccagcgttgaccaagtgtaaaaggcatatgtgttcggctctatatctttaattgcaggcaataaccacccgctaccgtgcttatgaggtagtggtgttattcaggtccaggaatggaaagggcgctatggtactggatggcaaagcattcgtcacgcatcaaaatggtatctggcgaactcttttttttgctcaaaatagcccaagttgcccggtcataagtgtagcaaaattatcctcaataaaagggagtattccctccgccacgggttgtagctggcgggtcagatagtgttcgtaatccagtggtgaacgttggtagtccagcggctccgggccgttggtggtccatacgtacttaatggtgccgcggttctgatattgcaaggggcgaccgcgcttatggttttcttcatcggcaaggcgagcggcgcgtacatgaggcggaacattacgctgatattcgctcagaggacggcgaaggcgtttacggtaaaccagctgcgtgtccagttcgcccgccatcagcttgtcgatggtttcgcgcacgtattcctgatatggctcgttgcggaagatacgcaggtacagctcctgctgaaactgctgggccagcggcgtccagtcggtgcgcacggtttccagccctttaaacaccatccgctgtttgtcgccctcctgaatcagtccggcgtagcgctttttgctgccggtatcggccccgcgaatggttggcatcagaaaacggcagaaatgggtttcatactccagttccagtgcgctggtcagccgttgtttttgcagcgtttccgcccaccaggcgttaacgtgctgcaccagtgcacgaccgattttcgctgcttcttcttccgaatgtgcacctttcagccagacaaacgttgagtcggtatcgccgtagataacatcatagccctgcgcttcaatcaacgttttggtttgccgcatgatctgatgaccacgcatggtgatcgacgatgccaggcgtggatcgaagaaacggcaggcggtggtgccgagcacaccataaaaggcattcataatgatcttcagcgcctgcgaaagcggcttattactctgacgtttggcttcatcgcgcccgtgccagatgttagtcacaatctccggcaggcaatgtttctcccgtgagaaccaggcatcgagaaaaccttcggtactgtgctctggatcaggctgcgccatgccttccaccagtccgacgggatcaatcagaaaggtgcggatgatcgacgggtacaggcttttgtagtccagcaccagcaccgaatcataaagcccaggtcgcgaatccatcacgtagccgccagggctggcgtgcggcggcacttcgccgagattaggcgcgacataaccagcgcgatgcatacggggaaaatagagatgaccaaacgctgccaccgaaccgccgtgtcgatctaccggcaggccgttcaccgtcgcccgttcgagcaaaaacggcatgatttcagttttgtggaagatctgcgtcaccagctcgcaatctttcaggttataagttgccagcgcaggcttatcttcggcgaaacggcggtcaatttcgtccattcgatcccacgggttatcgatagattttccttcgcctaataactcctgagcgacggtttccagcgagaatgaagagaaattccagaacgcggatttcagcgcctcgataccgtcgataatcagtcgccctttggcctgagcaaaaaagacgccgtttttaaagccgtgctcgcgccactccaactcgctgttatcacgccccagacgcagcggaatacggtaacgctcggcatgtttttgcagcattcgcagatcgaactgcaccacgttccaaccgatgatcacatcaggatcatgagtcgcaaaccaggcgttaagtttttccagtagcagcgggcggctggcgacgtattccagttcaaaatcgagcgcggaggcgtcgccattctctggccccagcatataaacgatacgctgcccgcaaccttccaggccgatgcagtacagctcaccgtggcgggtggtttcaatatcaatagaaacccacttgagcggcggacgatagtcgggatgctgtttcagacgggcattaacgatagcgccgttgcgcatatcaccctcgacccacactggcgaggtgataaaccgctccatcagatagcgttctggcgggcgcacatcggcctcgtagacggtaacgccagcttcacgcaggcgcttttcgtaattcatcaactggcgatgggcgcgacagtaaaggccatacaccggctggcgatgaaaatcctttaacgccagcggcgtcaggcgaaagccttgctcaccctgcaaaatatgctgggcgcggggaacctgatcggcgggaataaacgccacggactcttgcggcgcaagcgtaacctgcaacggcccgttgtccgtcgctaaccaaaaggaaacttcggttccttgcggggtgtcccgccagtgtcgggttaagataaaacctgcctgcgccacgctgaaaatccaataaaaaaccaggcttgattatagcctggtttcgttccaaaaccaaaatttattttgattggctgtggttttatacagtcattactgcccgtaatatgccttcgcgccatgcttacgcagatagtgtttatccagcagcgtttgctgcatatccggtaactgcggcgctaactgacggcagaatatccccatataagcgacttcttccagcacgatggcgttatgcaccgcatcttcggcgttttttccccatgcaaatgggccgtgagaatggaccagcacgccgggcatttgcgctgcattgataccctgtttttcgaaggtttctacgatgacgttaccggtttcccactcatattcaccgttgatttctgcgtcggtcattttgcgggtgcagggaatggtgccgtagaaatagtcggcgtgggtggtgccggctgctggaatcgactggcccgcctgcgcccagatggtggcgtggcgcgagtgtgtgtgcacaatgccgccaatagacgggaatgcctgatagagcagccggtgagttggcgtgtcggaggagggctttttcgtaccttcaaccacttcaccggtttcgatgctgaccacgaccatatcgtcagcggtcatgatgctgtagtcgacgccggaaggtttgatcaccaggacgccgcgcccgcgatcaacggcgctgacattgccccaggtgagcgtgaccaggttgtgttttggcagcgccaggttggcttctaatacctggcgtttgagatcttctaacatgttgactccttcgtgccggatgcgctttgcttatccggcctacaaaatcgcagcgtgtaggcctgataagacgcgtcggcgtcgcatcaggcggtgaatgccggatgcgctttgcttatccggcctacaaatccggaacgcgtaggcctgataagacgcgccagcgccgcatcaggcggtgaatgccggatgcgctttgcttatccggcctacaaatccggaacgcgtaggcctgataagacgcgtcagcgtcgcatcaggcgttacatacctgatgcggctacttagcgacgaaatccgtaatacacttcgttccagcgcagcgcgtctttaaacgctggaaggcgggtatcgttatcaatcactgtgatttcaatgtcgtgcatctcggcgaactggcgcatatcgttgaggttcagcgcatggctgaagacggtatggtgcgcgccaccggcaaggatccacgcttcggaagcgctcggcagatccggttgcgctttccacagcgcattcgccaccggcagtttcggcagggagtgcggtgttttcaccgtgtcgatgcagttaaccagcagacggtaacgatcgccgagatcaatcaggctggcgacaatggctggaccggtttgagtgttgaagatcaggcgggcaggatcgtctttaccgccaataccgagatgctgaacgtcgaggatcggtttctcttccacagcgatcgacggacagacttccagcatatgggagccgagtaccaggtcattacctttctcgaagtgataggtgtagtcctccataaaggaggtgccgccctgcagaccggttgacatcaccttcatgatgcgaagcagggcggcagttttccagtcgccttcgcccgcaaagccgtagccctgctgcatcagacgctgtacggccagacccggaagctgtttcaggccgtgcaaatcttcaaaggtagtagtgaaagcgtggaagccaccttgttccaggaaacgcttcatccccagctcaatacgcgccgcttccagcacgttctgtcgtttttcgccgtggatttgtgtggcaggtgtcatggtgtagcagctttcgtactcatcgaccagcgcgttaacatcgccgtcgcttatggagttcaccacctgcaccagatcgccaaccgcccaggtattgacggagaaaccaaacttgatctgtgcggcaactttatcgccatcggtgaccgctacttcacgcatgttatcgccaaaacggcagactttcagatgacgggtatcctgtttagagaccgcctgacgcatccaggagccaatacgctcatgtgcttgtttatcctgccagtgaccggtaacaacggcatgttgctgacgcatacgcgcgccgatgaagccgaactcgcgaccgccatgcgcggtctggttcaggttcataaagtccatgtcgatgctgtcccacggcagcgccgcgttgaactgggtgtggaattgcagcaacggtttgttgagcatggtcaggccgttgatccacattttggccggggagaaggtgtgcagccacaccaccagaccagcgcaacgatcgtcgtaattcgcgtcgcggcaaatagcggtgatttcatccggcgtggtgcccagcggtttcagcaccagtttgcagggcaacttcgcttctgtattcagtgcattaacaacgtgttccgcatgttgcgtcacctggcgcagagtctccgggccgtaaagatgctggctgccaatgacaaaccacacttcataattatcaaaaatcgtcattatcgtgtccttatagagtcggaacggcctggtcagcctgtgccggggcggaagttggaagatagtgttgttcggcgctcatcgcccattgctgatagcggcgataaagctgttcaaagcgttgtgcctgttcgttgcgcggttgcagggttttctctaccgcactggccattttttgctgggctgatgggatgtctgcgtgcactttcgcggcgacggcagcgaaaatcgccgcaccgagcgcgcaacattggtcagaagcaacaatttgcagcgggcgattcagcacgtcgcagcaggcctgcataatgacctggtttttgcgcgcgatgccgcccagtgccatcacgttattgacggcgatcccctgagcggtgaagcactccataattgcgcgtgcgccaaaggcggtggcggcaatcaaaccgccgaacagcagcggagcgtcggtagcgaggttcagatcggtaatcacccctttcaggcgttggttagcgttcggtgtgcggcggccgttaaaccagtcgagcaccaccggcaggtgatccagagacggatttttggcccatgcttcggtcagcgccggaagcagttgtttctggctggcgttgatttgctctttcagttccggatgctgggcggcaagctgttccagcggccagccgagtacgcgaccgaaccaggcgtagatatccccaaacgccgattggcctgcttccagaccgataaatccaggcaccacgctgccatcaacctgaccgcaaatacctttcactgcccgctcgccaacgctctgtttgtcggcaatcagaatgtcgcaggtggaagtaccgataacttttaccagtgcgttaggctgtgcgcctgcgccaactgcgcccatatggcagtcaaacgcgccgccggaaatcaccacgctttcaggcaggccgagacgctgcgcccattccgggcataaggtgcccaccggaatatcggcagtccaggtttcagtgaacagcggggaaggtaaatgacggttgaggatcgggtccagctcatcaaagaaactggctggcggcaggccaccccagctttcgtgccatagagatttatgcccggcgctgcaacgtccgcgacgaatatcctgcgggcgggtggtaccggaaagcagagctggcacccagtcgcacagctcaatccacgatgcggcagattgtgccacggcgttgtcctggcgagttatatgcaggatttttgcccagaaccattcgctggaataaataccgccaatatagcgggagtagtcaacgttgcccggcgcgtggcacaaacgggtaatctcttccgcttcttcaaccgcggtgtggtctttccacaatacgaacatcgcgttcgggttttcggcaaactccgggcgcagcgccaggacgttaccgtcggcgtcaatcggtgcgggcgtcgagccggttgtgtcaacgccaatcccgaccacagctgcgcgctgttcgacgctaagctctgcaagcacagttttcagcgccgcttccattgactcaatgtagtcacgcggatgatgacggaactggttattcggggcatcacaaaattgcccgttctgccaacggggataccactctacgctggtggcgatctcttcaccggtggcgcagtccaccgccaaagctcgcacagaatcactgccaaaatcgaggccaattgcaatcgccatcgtttcactccatccaaaaaaacgggtatggagaaacagtagagagttgcgaaaaaaagcgtcaggctggatccgctaatcttatggataaaaatgctatggcatagcaaagtgtgacgccgtgcaaataatcaatgtggacttttctgccgtgattatagacacttttgttacgcgtttttgtcatggctttggtcccgctttgttacagaatgcttttaataagcggggttaccggttgggttagcgagaagagccagtaaaagacgcagtgacggcaatgtctgatgcaatatggacaattggtttcttctctgaatggcgggagtatgaaaagtatggctgaagcgcaaaatgatcccctgctgccgggatactcgtttaacgcccatctggtggcgggtttaacgccgattgaggccaacggttatctcgatttttttatcgaccgaccgctgggaatgaaaggttatattctcaatctcaccattcgcggtcagggggtggtgaaaaatcagggacgagaatttgtctgccgaccgggtgatattttgctgttcccgcctggagagattcatcactacggtcgtcatccggaggctcacgaatggtatcaccagtgggtttactttcgtccgcgcgcctactggcatgaatggcttaactggccgtcgatatttgccaataccggtttctttcgcccggatgaagcgcaccagccgcatttcagcgacctgtttgggcaaatcattaatgccggacaaggggaagggcgctattcggaattgctggcgataaatctgcttgagcaattgttactgcggcgcatggaagcgattaacgagtcgctccatccaccgatggataatcgggtacgcgaggcttgtcagtacatcagcgatcacctggcagacagtaattttgatatcgccagcgtcgcacagcatgtctgcctgtcgccgtcgcgtctgtcgcatttgttccgccagcagttagggattagcgtattaagctggcgcgaggaccagcgcatcagtcaggcgaagctgcttttgagcaccacccggatgcctatcgccaccgtcggtcgcaatgtcggttttgacgatcaactctatttctcgcgagtatttaaaaaatgcaccggggcgagtccgagcgagtttagggcaggttgtgaataataagaaagaagggggggaacccccttgctttcttcatctgacgttatttatatatttcacgggggattaattttagttatttttagttgaatcgttttacctgaattattttttttcttgataaaatatcgacaacgatttctttttgtaaaaataaaacgaaggcttatgtatcgggatacccatcatgaacatattgtccggttgcatcaggagaatatatcaagcggtttgttcatcgtaggaacaccacattgagcggttatggcaggcacttcacgccaccataaatgccgttcgatgtggcagttgttgaaaaaagtacggcattctatgaaaaacgccagttactccctcagaggagaacatggtctggcaaaagtgtagcggcatcaggcgcagctatctttgtaaattcattcataaaatgaattgtatacaaaaaaatattgaaaaataatatttttccttattgatattatttgctatacgttttttttgaggggagattgtgatgagcaaacgtaacgatattactgatggaatatttgcaacaacgaaaaagtatggattagtttataccgaagagttaggttggatcgatttggggcatgctcagggacaagatgccagaatattaaaaagaaaattggagcaagaacatttttcaacatattacgatgaatttcatgattggtattttcctgttgattatcatcaggaaatgggaattcggaaaaaatattaggagtagatcttacatttcataccggtgtttatacgaaggttatggttcgttcatgtctttcacccactcttaaagcaagagttgccttaacgttaatgtatggaactgcgaagaggtttgaagcatggcaaaactcatttatttttaactggtatactgatagcggatttagtgcagaagatttagtctcagacttgattggtttttatcgtgtatttggaacaggccccgatccacttttattggcaaaacctttatcttacacaaaagccttacaaatatgggatacatatggagcgccagggaattttaaaaatactgagtttacgccattcttatttacaacccatcctccttttaaaaaaaatcaactaataaaaaagaagcttccagaatggttaaattatataaagccattagatgagtctttttcaacattgttatataatcaatataataatagacctgttactaattattataaagataaaaacagaataaatcatgagttgtatagttcattatcaagttcgggagctataaagttttcagaatctccctttgaaagaccgctttttcttttcttaaaccctcattatccgcacaggtcgtgagtagagatgtcaaaatatatttatattttattatcatttttagttttattctttatatttttctatgcttatatctcattgatgtcaaaggaacatcactatacacagcatgaactttccccatttttcctttatacgccagagagtttgcgaaatttgccaaacatatcaaacgtagccgagtatagctattactataatgttgatgatatgcaaacaagagtgattgttacatggcgaaatatagataacatttttcttcagaaagcaaagctaatagattttttgaaaagaatgggaccgagtctacaaaacgattgtatatggttttttcatgataaaagtgattatgcaaataatttccagcgttattgcgtcattgagcaccgtgattctctgcaggtggaatattttgagactatcgaatgataggcagagggtgtcttttgtgccggttgtgaagaaaaagtgaatgatgtagccgtcaagttgtcataattggtaacgaatcagataattgacggcttgacggagtagcatagggtttgcagaatccctgcttcgtccatttgacaggcacattatgcaagcattgctggaacactttattacccaatctaccgtgtattcattgatggcggtgttattggtggcctttctggagtcgctggcgctggtcggtttgattctacccggtacggtgctgatggcggggctgggagcactgattggcagcggcgagttaagtttctggcacgcctggctggcagggatcgtcggttgcctgctgggcgactggatctccttctggctgggctggcgttttaaaaagccgttgcatcgctggtcatttctgaagaagaacaaagcattactcgataaaaccgaacatgcgctgcatcagcacagcatgttcaccattctggtcggtcgttttgtcggcccgacgcgtccgctggtgccaatggtggcgggaatgctggatctcccggtggcaaaatttattacgccgaatattatcggctgcttgctgtggccaccgttttacttcctgccggggattctggcgggtgcggcgatcgatattcctgccgggatgcagagcggtgagtttaaatggttgctgctggcaacagcggtgtttttgtgggttggaggctggctgtgctggcggttatggcgcagcggtaaagcgactgaccgtttgagtcattatttgtcccgcggtcgtttgttgtggctgacgccgttgatttctgccatcggcgtggtggcgctggtggtgttaattcgccacccgttgatgccggtgtatatcgatattttgcgtaaagtggttggggtttagaggatagccttgtgcgggttgcctgatgcgacgcttgccgcgtcttatcaggcctacaaaacgcactacctgtaggtcggataaggcgttcacgccgcatccgacagtgcatattaacctttaattcccaacagcgccgaagcactcgccttaccgctcaacaactcatcggtcttaccctgccaggcgatacgcccgtcggcgaccaccaccgagcgcgtggcgatccgcgccgcatcttccacactgtgcgacaccatcaatagcgtcattttttgctgttggcagctcgtgctcaccagcgtcagcatctcctgacgtagcgccggatcgagcgcggaaaacggttcatcgagcaataaaatgggctgttcgcgtaccagacaacgcgctaacgccacgcgctgtcgttgaccgccggaaagctcgccaggtaaccgcgccattaaattatcaatccccatctggtgggcaatcgcgtgcattttcttctgctgcgccgcatttagtttcaaccccggatttagccccagcccgatgttctgcgcgaccgtcaggtggctgaacaggttgttctcctgaaacagcatcgacaccggacggcgtgacggcggcgtcgtggtgtgatctacgtcgtcgatagtcagcaaaccgctggctggcgtcagaaaaccggcgatcaaattaagcagggtacttttacccgcgccgcttggcccgaggatcgccacctgctcgccgcgttccaccgttaagctaaaacgcatcggcaaatgctggtaaagccaggtgatatcagtcagttttaacatttcgccccggtattttttcaatcacggtaaacagcagaaaacagagcagcagcagaattaacgcggtgaccgcgccgtcctggctgcgataggagccaatttgctggtagagataaaacggcagggtacggaaatcatcgttaccgaacaatgccaccacgccaaaatcaccaatcgacagcacacaagcaaaggccagcgcctgcgccagtggacgtttcagggcgcgcagctccaccacttttaagcgtgaccagccttcaatgcccagcgactgacacaacatgctgtagcgggcggtgatatcgcgcatcgggttttccagtactttcagcgcataagggattgccattaacgcattggtgaaaatcacaatgccgtcagcagattgcggcaggccgatagtgttgttgagcagtaaaaagaagcccgtagccagcacaatccccggcatggcgaggatcaacatgccgctcatctccagcgcctgacccgccagcattttctgccgcgcccgaagttcgcgactgctccatagcagcatcatggtcagcactacgcacaatacgcctgccgccagcgcaatacgcaacgaggtccacagcgcctgccacagcaccggttgtgccagcacttccggcaactggcgatttaccccatcgacgatcaccgccagtaacggtggcagcaacagcagcagcgccagcacaattaacgccgtgtcgcaaatgcgactatgcagacgatcgtccgggtcgcgccagccttgcagcagtgtggtaccaggcgcaatggccttactcaatcgctgactcaacagcaccagcccgaggcagcacaccatctggatcagcgccagcattgccgcgcgggcaggatcgtagtcgtaactcagtgcctgatagattgccagctcgatagtggtcgcctgcggaccgccgcccagcgatagcacggtggcgaagctggcgaaacagagcataaagattagtgcggcaaccggcgggatttgtcgccgtaaccacggccattcgacgaaacggaaaaaatgccagccgcgcatcccaagttgggcggcaagctgacgttgttcgccgggaatgttttccagtgcctggagtaataaacggctagccatcggcagattaaaaaacacatgggccagcaaaatgccttgcaggccgtagggcgaaaaggtccactccagaccaagtgattgccagagcgaggccagccagccctggcgaccatagacgctaagaatgccgaaaacagcaaccagcaccgggaggatcaaggtcattgcgcacagacgcaacagcatctgtcgcccaggaaagcgcctgcgatagagggcgcgggcgaggaatattgcgggtacgacagagagctgcgccgagagaaacgcctgccagaaggagaagcgcaccacatgccacaggtagctgtcctgccagactgccacccagtcaccctgcggcgcgttccaccacagggcgagaaacgccgccagtgcaaccgctaccaccagcgtggcggcgcttacgcctggaattaaccagccgggaattaacggctgacggcgcgttgccattcgctaatccatgcctgacgttgtgccgccacttcggcgggtgtgaactctagcgtggtggctggtttggtcaattgttcaaatcctgcaggcagagtgacgtttgctaccggatacatccagttgccggttgggatcgcattctgaaaagccggagaaaccataaactggaggaatttttgcgccagctctggctgcttgctggcagcggtgcgggcggcaacttccacctgcagatagtgaccttcgctaaagtttgtggcggcgtagttatctttcttctcttcgagaatgtgataagccggagaggtggtgtaactcagtaccagatcgctttcgccttttaaaaacaggccgtaggcttcgctccagcctttggtgaccgtgacagttttcttcgccagtttctgccaggcttgcggggcgttatcgccatagactttttgcatccatagcaacagacccagccccggcgtactggtacgtggatcttcataaatcacccgccagttctgatcgctctcaaccagttctttcaggctttgcggcggatttttcagtttgttcttgtcatagacgaaggcgaaatagccgtaatcaaacggtacgaaagtgtcattattccagccgccaggaacgttaacggcttccgctgccacaccgcttttagcaaacagccctgttttgctggcggcgtctaacagattgttatccagccccagcaccacatcggctttgctgtttttgccttccatccgtagacggttgagcagcgaaacgccatcttccagcgccaccagtttcagttcgcaattacagtctgcttcaaaggcttttttgactaccggaccaggtccccagtcagcggcaaaggaatcgtaggtataaacagtcagaacaggtttagcgaaaacaggcgctgtgcacagcaacagcaggggaagacatttttttaacactttgcacctcacaaaagagtggcaaaggacttgagaaggagcctcaaatcccttcgccggcgttatccggatcaggttcgacgggtattttctcagcgcacgcggctgcgtggcaccccgttgagaacggcgttagtgtagtgattttgttatcaaccagcaatcatggatccggtggtgcaaaccacgctgatttaaaatcgaaccagccgagggtgttcatgcgcaggccgcgcatactacgttgcccctgaatgatcagccagtggtggataagtggcaccattgctttgctggcgaccagttgctggcaccagttcgccaggttcatttcgccattgcgccagcgggcggcgtcggcttgccagtcgatcggaatacagtgttggagcagcggcacctcgcacaagtgcgcgaacagcgaaaaatccagcggcagcgtaaagttggcgctgttaagccagatatcgctctcgatctctccttcatgccactgatcgtagctgatctctttgatttccagcgtgacctggtgacttgccagaatctgctgcatgatcccggcaatcacccgatgctcgctgtgatcctgataaaaggtcagggtgaggctttccagaccagccggtttttcgctctttatggtgcgggcatggtgccaacgggggagcagtccataagccgggaaccacagttgctggtactgttcctcagcgaaatagaccagattcgtcggagaaagcacatagcttacccagtctctgacttgctgattcgcccctcgatgggtgcggctgtcgaacagtaaatagtagcaaccttcctccaggcggctttcaatctctttttcctcgccctgtggaccttttagcatcagccctccggctggctcgtcggcaatttccggcagaacccagacgttaacttcgtcgattaatgcccggtaaccgaagaagtcatcgaatgcctgaattttcagttgattggtgctgttgcggatcaccgcatacggaccggtgccgatgggatggctggcaaagttactgagggtttcccattcgcgcggcaggatcattgccggaacttgccccagcagtaacggcaaccagcggtccggttgcgtgagatggatatccagcgtccagggcgtcggcgacacaatgttagcaatatgcgaatagagcggaagcgtattgattcgttttaaagaggcgatcacatcgtccatttccagttcacgaccatggtgaaaatggactcctggacgcaaaaagaaacgccagtgaagcggtgatatttgctgccagtggtgtgcgatgtctgcttccagttccccattttcctcatttatgcgcgttagcgaactgaagatttgccgggcgatatgggtttcagaacggcgcaatgcgctgccaggtagcagattacgcaacggacgatagtagagcacgcgcaggatgtgccgcccctggcggaagctgcggcccagatgagaaaccagcatttgccgcacagtcgctttgtcgccaaccaactgcactagttggtcgatacgatcctgctccagcaggtcttccgcccgctgttgctgaagcgccagcccggtatagaggaatgtcaggcgtgaacgtttaccgcgcccgacttccgcttcccacgtcagccagccgcgatcctgcatggtgttgagcagggtgcgcatatgacgacgcgagcaactcagtaacgctgccagttcgttgagcgtggtctcctgagatttaccctcgcagcattgccacaggcggatgaactgttgttgcagacgagcagatggcataaaaggggaactcctgcgcaaaagacagcaattttattttccctatattaagtcaataattcctaacgatgaagcaaggaggtgccccatgcgtcagttttatcagcactattttaccgcgacagcgaagttgtgctggttgcgttggttaagcgtcccacaacgattaaccatgcttgaagagctgatgcagtgggaggggagtcattctgactactgatttgcggacatcatgtgtgactgagtattggtgttaatcgccacgccagcagtgattatctgctggcttttttctcttttcttttttttttctttttggcgattgagtgccggacggtgtacaaactaacgcataaacgccggttgcttctcttcataagacgcaatagcatcgtcgtgctgcagagtcaggccgatgctgtccagaccgttcatcatgcagtggcggcggaaggcatcgatggtaaagcgataagttttctctcccgctttcacctcttgcgcttccaggtctacatcaaaatgaatccccggattggctttcaccagcgcaaacagctcatccacttctgcatcgcttaatttcaccggcagcagctggttgttaaagctattgccgtagaagatgtcagcaaaactcggcgcaatcaccaccttaaaaccgtaatcggtcaatgcccacggcgcgtgctcacgcgaggaaccgcagccgaagttttctcgtgccagcaaaatggaagcgccctgatactgcgggaagttcagcacgaagtccgggtttggctgttggcctttttcatccagaaaacgccagtcgttaaacagatgcgcgccaaaacccgtacgggtcactttctgcaaaaactgtttcgggatgattgcatcggtatcgacattggcggcatccaacggaaccaccaggcctgtgtgtttgataaatttctctgccatggtgtgctccttatttaatgttgcgaatgtcggcgaaatgtccggtcacagccgcggcggcagccattgccggactgaccagatgcgtgcgcccgccgcgcccctggcggccttcaaagttacggttgctggtggaggcgcaacgttcgcccggattcaggcggtcgttgttcatcgccaggcacattgaacaacctggcaagcgccattcaaaaccagcttcgataaaaattttgtccagaccttccgcttccgcctgggctttaaccggaccggagccgggaaccaccagcgcttgtacgcctggcgcgactttccggcctttggcgatttccgctgccgcgcgtaaatcttcaatacgcgagttagtacaggaaccaataaacactttgtcgatagccacttctgtcagcggaatacccggtttcagccccatataggccagcgctttttctgccgacgcgcgttcaaccggatcggcaaacgaagccggatcgggaatattgtcgttcacagaaatcacctggcctggattggtgccccaggtgacctgcggcgaaatctcttctgcttgcagagtgacaacggtatcgaaagttgctccttcgtcggtttgcagggttttccagtaggcaacggcgtcgtcgaaatctttgcctttcggcgcatgcagacggcctttaacatagttaaaggtggtttcgtccggtgcaaccagaccggcttttgcgcccatttcgattgccatattgcacagggtcatacgaccttccatgcttaaatcacggattgcttcgccgcaaaattccaccacatgcccggtaccgcctgcgctgccggttttaccaataattgccagcacgatatcttttgcggtaatgcccggcgcggctttgccctggacttcaattttcatggtcttcgcccggccctgtttcagggtttgcgttgccagtacgtgttcaacttcggaagtgccgataccaaaggccagtgcgccaaacgcgccgtgggtggcggtatgtgagtcgccgcagacaatggtcatccccggcaaggtcacgccctgttccggccccattacgtggacgatcccctgatacgggtgattcaggtcatacagctcgacgccaaattctttgcagtttttgatcagctcctgcatctggatgcgcgccatttcaccgcaggcattaatgtctttcgtctgggtagagacgttgtgatccatggtggcgaaggttttgcccggctgacgtaccgggcgaccgtgggcgcgcagaccatcgaacgcctgcggtgaggtcacttcatgcaccaggtggcggtcgatatataacagcggggtttcgttttcggcttcgtacactacgtgagcgtcgaataatttttcgtataacgtcttagccatgattacaccccttctgccacatagcgggcaatgatatcgcccatttcatcggtactaacggcggcagcgccacgggctaaatccccagtgcgaatgccttcttctaatgcgcggttaatggcgcgttcaatggcggaagccgcatcatcggcatccaggctgtaacgcagcagcagcgccagcgacagaatttgtgcaatcgggttggcgatatttttacctgcgatatcgggtgccgagccgcccgccggttcatacagaccaaaaccttgctcgttcaggctggcggaaggcaacatccccattgagccagtgatcattgcgcactcatcagacagaatgtcgccaaacaggttggagcacagcaagacgtcaaactgtgatggatctttaatcagctgcatggtggcgttgtcgatgtacatatgcgtcagttcgacgtccgggtattccgtggcgatctcgttaacgatctcccgccataaaatagaggattgcagcacgttggctttgtcgattgaggtgactttgtggcgacgcttgcgggcagattcaaatgcgatgcgggcaatacgctcgatctcaaaacggtggtacacctcggtatcaaacgctttttcatattgtccgctaccttcgcggccttttggctgaccgaaatagatgccgccggtcagttcgcgcacacacaggatgtcaaagccgtttgcggcaatgtcagcacgcagtgggcagaacgcttccagcccctgatacagttttgccggacgcagattgctgaataatttgaagtgtttacgcaaaggcagcagtgcgccgcgttctggttgctggtctggcggcaaatgttcccacttcggaccacctaccgagccaaacagcacggcatcggcttgctcacaaccttcaaccgtcgcaggcggcagcggctgtccgtggttatcaatggctgcgccgcctacatcgtaatggctggtggtgatacgcatcgcaaatcggttgcgcacggcatccagcactttcagcgcctgggtcatcacttccggaccaataccgtcccccggcaatacggcaatatggtaattcttcgacatcacacggtttccttgttgttttcgttgtgttgagctttgcgttgcaactctttttcgacttctgcggcacgccagatattgttcagtacgtgcaccatggctttggcggaggactcgacaatatcggtggccaggccgacgccgtggaagcggcgaccgttgtagttggcgacaatatccacctgacccagcgcatctttaccgtggcctttggcggtcaggctgtatttcaccagttcgacgttatagtcagtgatgcggtttatcgcctggtagacggcatcgaccggaccgttaccgttggcggcttctgctttgacttcttcgccacaggccagtttgacggcggcagtggcaatatcgttagaacctgactgcacgctgaagtaatccagacggaaatgctccggctcttcttgctgcttaccgatgaaggccagcgcctccagatcgtaatcaaacacctggccttttttgtccgccagcttcaggaaagcgtcgtacaggttgtctaaattatattcactttctttatatcccatctcatccatgcgatgtttcaccgccgcacgccccgaacgagaggtcagattcagctggatttggttcagaccaatagattctggtgtcatgatttcgtagttttcgcggtttttcagtacaccatcctggtggataccggaggagtgtgcgaatgcgccgctgccaacaatggctttgtttgccgggatcggcatattacaaatctggctaactaactggctggtgcgccatatctcctggtgattgatggcggtgtggacgttgagaatatccttacgaactttgatcgccatgatgacttcttcaagggaacagttaccggcacgctcgccgatcccgttcattgcgccttctacctgccgtgctccggcatgtaccgccgccagtgagttgccgaccgccaggcccaaatcgtcgtgggtatgtacggaaataatggctttgtcgatgttgggtacgcgttcatacaggccgctgatgattccggcgaactcaaatggcatggtgtagcccacggtgtccggaatgttgatggtggtggcaccggcattaatcgccgcttcgaccactcgcgccagatcggcaattggggtgcgtccggcatcttcgcaagaaaattcaacatcatcggtgtaattacgggcgcgtttcaccatatagatagcgcgttcgatcacttcgtccagcgtgctgcgcagcttggtggcgatgtgcattggcgaagtggcaataaaggtatgaatacggaaggcttcggcgactttcagggattcggctgccacgtcaatatctttttccacgcagcgagctaacgcgcatacacggctgtttttaacctggcgagcgatggtctgcactgattcaaaatcacccggcgaagagacggggaaaccgacttccataacgtcaacacccatacgctcaagggccagcgcaatttgcagtttttctttcacactcaagcttgcctgtaacgcctgttcaccgtcgcgcaatgtggtatcgaaaataatgacttgctggctcatggtttgggtccttgtctcttttgagcgcctcgcttcgggcataaaaaaacccgcgcaatggcgcgggtttttgtttgactgcgtgctggcttaatgctggatgccgctcactcgtctaccgcgcaaagaagatgcgtttagtagtagtagaccgataaagcgaacgatgtgagtcattaaatcagctccagatgaatgcgatatgcttttagagttactggatacaaaaacggatgtcaaccctgaagcaataaaaacgtcacgccattgtgagttcggcatccgtaaaattagctaattgtgctgcggtggttaaaacaagcgatattaatttctgcttaaccgccgatgcttttcatcggttgacatatttcagaataattttttgcatctaatcaacgagggaaagggggataaaatgcacgcgttacaaaacctatcctgatgatttgtattgaattatatgttttgcgaattttttgatattcatttgctgaatattattgatcaattaatgttaagaattaatgcattaaacatataaattaattattaaaaaacacatttaatccattttgtggatgattgagtattcgtggtagttatgattagattgttttcgcaacaaaaacattatggattattatgctgtagtaaatgactctttgctcggcagtggattctgtttttatcagaacctgtatctttatgttttcctaattttactcattttgctttttcttattttatatgcatgataaatcatattctcgaggattatttctctgcattccaataagggaaagggagttaagtgtgacagtggagttaagtatgccagaggtacaaacagatcatccagagacggcggagttaagcaagccacagctacgcatggtcgatctcaacttattaaccgttttcgatgccgtgatgcaggagcaaaacatcacccgtgccgctcatgctctgggaatgtcgcaacctgcggtcagtaacgctgttgcacgcctgaaggtgatgtttaatgacgagctttttgttcgttatggccgtggtattcaaccgactgctcgcgcatttcaactttttggctcagttcgtcaggcattgcaactagtacaaaatgaattgcctggttcaggttttgaacccgcgagcagtgaacgtgtatttcatctttgtgtttgcagcccgttagacagcattctgacctcgcagatttataatcacattgagcagattgcgccaaatatacatgttatgttcaagtcttcattaaatcagaacactgaacatcagctgcgttatcaggaaacggagtttgtgattagttatgaagacttccatcgccctgaatttaccagtgtgccattatttaaagatgaaatggtgttggtagccagcaaaaatcatccaacaattaaaggcccgttactgaagcatgatgtttataacgaacaacacgctgcggtttcgctcgatcgtttcgcatcatttagtcaaacctggtatgacacggtagataagcaagccagtatcgcgtatcagggcatggcaatgatgagcgtacttagcgtggtgtcgcaaacgcatctggtcgctattgcgccgcgttggttggctgaagagttcgctgaatccttagagttacaggtattaccgctgccgttaaaacaaaacagcagaacctgttatctctcctggcatgaagctgccgggcgcgataaaggccatcagtggatggaagagcaattagtctcaatttgcaaacgctaactgaatgcagaataggtcagacatcaatgtctggtttattctgcattttttattgaatgtagaattttattctgaatgtttgtgctctctattttaggattaattaaaaaaatagagaaattgctgtaagttgtaggattcagccgatttattatcaatttcatcctctgtaatggaggattttatcgtttcttttcacctttcctcctgtttattcttattaccccgtgtttatgtctctgtctgccaattgcttaagcaagatcggacggttaatgtgttttacacattttttccgtcaaacagtgaggcaggccatggagatgttgtctggagccgagatggtcgtccgatcgcttatcgatcagggcgttaaacaagtattcggttatcctggaggcgcggtccttgatatttacgatgcattgcataccgtgggtggtatcgatcatgttttagttcgccatgagcaggcggcggtgcatatggccgatggtctggcgcgcgcgaccggggaagtcggcgtcgtgctggtaacgtcgggtccaggggcgaccaatgcaattactggcattgccaccgcttatatggattccattccattagttgtcctttccgggcaggtagcgacctcgttgataggttatgatgcctttcaggagtgcgacatggtggggatttctcgcccggtggttaaacacagttttctggttaagcaaacggaagacattccgcaggtgctgaaaaaggctttctggctagcggcaagtggtcgtcctggacccgtggtcgttgatttaccgaaagatatcctaaatccggcgaacaaattaccctatgtctggccggagtcggtcagtatgcgttcttacaatcccacgacctccgggcataaagggcaaattaagcgcgctctgcaaacgctggtggcggcaaaaaaaccggttgtctacgtaggcggtggggcaatcacggcgggctgccatctgcagttgaaagaagcggtggaggtgttgaatctgcccgttgtttcctctttgatggggctgggggcgtttccggcaacgcatcgccaggcactgggcatgttgggaatgcacggtacctacgaagccaatatgacgatgcataacgcggatgtgattttcgccgtcggggtacgttttgatgaccgaacgacgaacaatctggcaaagtactgcccaaatgccactgttctgcatatcgatattgatccaacctcaatttctaaaaccgtgactgctgatatcccgattgtgggggatgctcgccaggtcctcgaacaaatgcttgaactcctgtcgcaagaatccgcccatcaaccgctggatgagatccgcgactggtggcagcagattgaacagtggcgcgctcgtcagtgcctgaaatatgacactcacagtgaaaagattaaaccgcaggcggtgatcgagactctttggcggttgactaatggggacgcttacgtgacgtccgatgtcgggcagcaccagatgtttgctgcgctttattatccattcgacaaaccgcgtcgctggatcaactctggcggcctcggcacgatgggttttggtttacctgcggcactgggcgtcaaaatggcgttgccagaagaaaccgtggtttgcgtcactggtgacggcagtattcagatgaacatccaggaactgtctaccgcgttgcaatatgagttgcccgtactggtggtgaatctcaataaccgctatctggggatggtgaagcagtggcaggacatgatctattccggccgtcattcacaatcttatatgcagtccttaccagacttcgtccgtctggcggaagcctatggtcacgtcgggatccagatctctcatccgcaagaactggaaagcaaacttagcgaggcgctggaacaggtgcgcaataatcgtctggtgtttgttgatgttaccgtcgatggcagtgagcacgtctacccgatgcagattcgcgggggcggaatggatgaaatgtggttaagcaaaacggagagaacctgattatgcgccggatattatcagtcttactcgaaaatgaatcaggcgcgttatcccgcgtgattggccttttttcccagcgtggctacaacattgaaagcctgaccgttgcgccaaccgacgatccgacattatcgcgtatgaccattcagaccgtgggcgatgaaaaagtgcttgagcaaatcgaaaagcaattacacaagctggtcgatgtcttgcgcgtgagcgagttggggcagggcgcgcacgttgagcgggaaatcatgctggtgaaaattcaggccagcggttacgggcgtgacgaagtgaaacgtaatacggaaatattccgtgggcaaattatcgatgtcacaccctcgctttataccgttcaattagcaggcaccagcgataagcttgatgcatttttagcatcgattcgcgatgtggcgaaaattgtggaagttgctcgctctggtgtggtcggactttcacgcggcgataaaataatgcgttgagaatgatctcaatgcgcaatttgcagcccaacatgtcacgttgggctttttttgcgaaatcagtgggaacctggaataaaagcagttgccgcagttaattttctgcgcttagatgttaatgaatttaacccataccagtacaatggctatggtttttacattttacgcaaggggcaattgtgaaactggatgaaatcgctcggctggcgggagtgtcgcggaccactgcaagctatgttattaacggcaaagcgaagcaataccgtgtgagcgacaaaaccgttgaaaaagtcatggcagtagtgcgtgagcacaattatcacccgaacgccgtggcagctgggcttcgtgctggacgcacacgttctattggtcttgtgatccccgatctggagaacaccagctatacccgcatcgctaactatcttgaacgccaggcgcggcaacggggttatcaactgctgattgcctgctcggaagatcagcccgacaacgaaatgcgctgcattgagcaccttttacagcgtcaggttgatgccattattgtttcgacgtcgttgccacctgagcatcctttttatcaacgctgggctaacgacccgttcccgattgtcgcgctggaccgcgccctcgatcgtgaacacttcaccagcgtggttggtgccgatcaggatgatgccgaaatgctggcggaagagttacgtaagtttcccgccgagacggtgctttatcttggcgcgctgccggagctttctgtcagcttcctgcgtgaacaaggcttccgtactgcctggaaagatgatccgcgcgaagtgcatttcctttatgccaacagctatgagcgggaggcagctgcccagttattcgaaaaatggctggaaacgcatccgatgccgcaggcgctgttcacaacgtcgtttgcgttgttgcaaggggtgatggatgtcacgctacgtcgcgacggcaaactgccttctgacctggcaattgccacctttggcgataacgaactgctcgacttcttacagtgcccggtgctggcagtggctcaacgtcaccgcgatgtcgcagaacgtgtgctggagattgtcctggcgagcctggacgaaccgcgtaagccaaaacctggtttaacgcgcattaaacgtaatctctatcgccgcggcgtgctcagccgtagctaagccgcgaacaaaagtacgcgccaggtgaatttctctctggcgcgttgagtacgggaatggacatcaatatccttaaagtaaataagactattcctggctattattgataaatgcttttaaacccgcccgttaattaactcacctgctgaaattcacaataattaaatgatattgacagcgcgtttttgcattattttgttacatgcagagatgaattgccgatttaacaaacacttttctttgtttttgcgcaaacctgctggcatcaagcgccacacagacgcaacagggactgttaaccagagaagatatgtcctaaaatgccgctcgcgtcgcaaactgacactttatatttgctgtggaaaatagtgagtcattttaaaacggtgatgacgatgagggattttttcttacagctattcataacgttaatttgcttcgcacgttggacgtaaaataaacaacgctgatattagccgtaaacatcgggttttttacctcggtatgccttgtgactggcttgacaagcttttcctccgctccgtaaactcctttcagtgggaaattgtggggcaaagtgggaataaggggtgaggctggcatgttccggggagcaacgttagtcaatctcgacagcaaagggcgcttatcagtgcctacccgttatcgggaacagctgcttgagaacgctgccggtcaaatggtttgcaccattgacattcatcacccgtgcctgctgctttaccccctgcctgaatgggaaattatcgagcaaaaattatcgcgtctgtcgagcatgaacccggttgagcgccgtgtgcagcgcctactgttaggtcatgccagcgaatgtcagatggatggcgcaggtcgattgttaatcgcgccagtactgcggcaacatgccgggctgacaaaagaagtgatgctggttggacagttcaacaagtttgagctgtgggatgaaacaacctggcatcaacaggtcaaggaagatatcgacgcagagcagttggctaccggagacttatcggagcgactgcaggacttgtctctataaaatgatggaaaactataaacattttacggtgctgctggatgaagccgttaatggcctcaatatccgtcctgatggcatctacattgatgggacttttggtcgcggtggtcactcacgtctgatcctctcgcagcttggcgaagaggggcgtttgctggcgatcgatcgcgacccgcaggctatcgccgttgcgaagactattgatgatccgcgcttctccatcatccacggacctttctccgcgctgggcgaatacgttgccgaccgcgatcttatcggcaagatcgacggcattctcctcgatcttggcgtctcttcaccgcaacttgatgatgctgagcgcggcttttcctttatgcgcgatggtccgctggacatgcgtatggacccaacccgtgggcagtcagccgctgaatggctacaaaccgcagaagaagccgatatcgcctgggtattgaaaacctatggtgaagagcgttttgccaaacgcattgcccgcgccattgtcgagcataaccgcgaacagccgatgacccgcaccaaagaactggcggaagtcgtggctgccgcaacgccggtgaaagataagtttaaacatcccgcgacccgtaccttccaggcggtgcgcatttgggtaaacagtgaactggaggagatagagcaggcgctaaaaagctcgctccatgtgctggccccgggtgggcggctttcgatcatcagcttccactcacttgaagaccgcattgtgaaacgttttatgcgtgaaaacagccgcggtccgcaagttccggcagggttaccgatgacagaagagcagctcaaaaaactgggggggcgtcagttgcgagcactaggtaagttgatgccgggcgaagaagaggtggctgagaaccctcgtgcccgtagttcagttctgcgtattgcagagaggacgaacgcatgatcagcagagtgacagaagctctaagcaaagttaaaggatcgatgggaagccacgagcgccatgccttgcctggcgttatcggtgacgatcttttgcgatttgggaagctgccactctgcctgttcatttgcattattttgacggcggtgaccgtggtaaccacggcgcaccatacccgtttactgaccgctcagcgcgaacaactggtgctggagcgagatgctttagacattgaatggcgcaacctgatccttgaagagaatgcgctcggcgaccatagccgggtggaaagaatagccacggaaaagctgcaaatgcagcatgttgatccgtcacaagaaaatatcgtagtgcaaaaataaggataaacgcgacgcatgaaagcagcggcgaaaacgcagaaaccaaaacgtcaggaagaacatgccaactttatcagttggcgttttgcgttgttatgcggctgtattctcctggcgctggcttttctgctcggacgcgtagcgtggttacaagttatctccccggatatgctggtgaaagagggcgacatgcgttctcttcgcgttcagcaagtttccacctcccgcggcatgattactgaccgttctggtcgcccgttagcggtgagcgtgccggttaaagcgatttgggctgacccgaaagaagtgcatgacgctggcggtatcagcgtcggtgatcgctggaaggcgctggctaacgcactcaacattccgctggatcagctttcagcccgcattaacgccaacccgaaagggcgctttatttatctggcgcgtcaggtaaaccctgacatggcagagtacatcaaaaaactgaaactgccggggattcatctgcgtgaagaatctcgccgttattatccatccggcgaagtgaccgctcacctcatcggctttactaacgtcgatagccaagggattgagggcgtcgagaagagtttcgataaatggcttaccgggcagccgggtgagcgcattgtgcgtaaagaccgctatggtcgcgtaattgaagatatttcttctactgacagccaggcagcgcacaacctgacgctgagtattgatgaacgcctgcaggcgctggtttatcgcgaactgaacaacgcggtagcctttaacaaggctgaatctggtagcgccgtgctggtggatgtcaacaccggtgaagtgctggcgatggctaacagcccgtcatacaacccaaataatctgagcggcacgccgaaagaagcgatgcgtaaccgtaccatcaccgacgtgtttgaaccgggctcaacggttaaaccgatggtggtgatgaccgcgttgcaacgtggcgtggtgcgggaaaactcggtactcaataccgttccttatcgaattaacggtcacgaaatcaaagacgtggcgcgctacagcgaattaaccctgaccggggtattacagaagtcgagtaacgtcggtgtttccaaactggcgttagcgatgccgtcctcagcgttagtagatacttactcacgttttggactgggaaaagcgaccaatttggggttggtcggagaacgcagtggcttatatcctcaaaaacaacggtggtctgacatagagagggccaccttctctttcggctacgggctaatggtaacaccgttacagttagcgcgagtctacgcaactatcggcagctacggcatttatcgcccactgtcgattaccaaagttgaccccccggttcccggtgaacgtgtcttcccggaatccattgttcgcaccgtggtgcatatgatggaaagcgtggcgctaccgggcggcggcggcgtgaaggcggcgattaaaggctatcgtatcgccattaaaaccggtaccgcgaaaaaggtcgggccggacggtcgctacatcaataaatatattgcttataccgcaggcgttgcgcctgcgagtcagccgcgcttcgcgctggttgttgttatcaacgatccgcaggcgggtaaatactacggcggcgccgtttccgcgccggtctttggtgccatcatgggcggcgtattgcgtaccatgaacatcgagccggatgcgctgacaacgggcgataaaaatgaatttgtgattaatcaaggcgagggtacaggtggcagatcgtaatttgcgcgaccttcttgctccgtgggtgccagacgcaccttcgcgagcactgcgagagatgacactcgacagccgtgtggctgcggcgggcgatctctttgtagctgtagtaggtcatcaggcggacgggcgtcgatatatcccgcaggcgatagcgcaaggtgtggctgccattattgcagaggcgaaagatgaggcgaccgacggtgaaatccgtgaaatgcacggcgtaccggtcatctatctcagccagctcaacgagcgtttatctgcactggcgggccgcttttaccatgaaccctctgacaatttacgtctcgtgggcgtaacgggcaccaacggcaaaaccacgactacccagctgttggcgcagtggagccaactgcttggcgaacccagcgcggtaatgggcaccgttggtaacggcctgctggggaaagtgatcccgacagaaaatacaaccggttcggcagtcgatgttcagcatgagctggcggggctggtggatcagggcgcgactttttgcgcaatggaagtttcatcccacgggctggtacaacaccgtgtggcggcattgaaatttgcggcgtcggtctttaccaacttaagccgcgatcaccttgattatcatggtgatatggaacactacgaagccgcgaaatggctgctttattctgcacatcattgcggtcaggcgattattaacgccgacgatgaagtgggccgccgctggctggcaaaactgccggacgcggttgcggtatcaatggaagatcatatcaatccgaactgtcacggacgctggttgaaagcgaccgacgtgaactatcacgacagcggtgcgaccattcgctttagctcgagttggggcgatggggaaattgaaagtcgcctgatgggcgcattcaacgtcagcaacctgctgctggcgctggcgacactgctggcactcggctatccgctggctgatttgctgaaaaccgccgcgcgtctgcaaccggtttgcggacgtatggaagtgttcactgcaccaggcaaaccgacggtggtggtggattacgcgcatacgccggatgcactggaaaaagccttacaggcggcgcgcctgcactgtgcgggcaagctgtggtgcgtctttggctgcggtggcgatcgtgataaaggcaaacgtccactgatgggcgcaattgctgaagagtttgctgacgtggcggtggtgacggacgataacccgcgtaccgaagagcctcgtgccatcatcaacgatattctggcgggaatgttagatgccggatatgccaaagtgatggaaggccgtgctgaagcggtgacttgcgccgttatgcaggctaaagagaatgatgtggtactggtcgcgggcaaaggccatgaggactaccagattgttggcaatcagcgtctggactactccgatcgcgtcacggtggcgcgtctgctgggggtgattgcatgattagcgtaacccttagccaacttaccgatattctcaacggtgaactgcaaggtgcagatattacccttgatgctgtaaccactgacacgcgaaaactgacgccgggctgcctgtttgttgccctgaaaggcgaacgtttcgatgctcatgattttgccgaccaggcgaaagctggcggcgcaggcgcactactggttagccgtccgctggatattgatctgccgcagttaatcgtcaaggatacgcgtctggcgtttggtgaactggctgcatgggttcgccagcaagttccggcgcgcgtggttgctctgacaggttcctccggcaaaacctccgttaaagagatgacggcggcaattttaagccagtgcggcaacacactttatacggcaggcaatctcaataacgacatcggtgtaccgatgacgctgttgcgcttaacgccggaatacgattacgcagttattgaacttggcgcgaaccatcagggtgaaattgcctggactgtgagtctgactcgcccggaagcggcgctggtcaacaacctggcagcggcgcatctggaaggttttggctcgcttgcgggtgtcgcgaaagcgaaaggtgaaatctttagcggcctgccggaaaacggtatcgccattatgaacgccgacaacaacgactggttgaactggcagagcgtaattggctcacgcaaagtgtggcgtttctcacctaatgccgccaacagcgatttcaccgccaccaatatccatgtaacctcacacggtacggaatttaccctgcaaacccctacaggtagcgtcgatgttctgctgccgttgccggggtgtcacaatattgcgaatgcgctggcagccgctgcgctctccatgtccgtgggcgcaacgcttgatgctatcaaagcggggctggcaaatctgaaagctgttccaggccgtctgttccccataaaactggcagaaaaccagttgctgctcgacgactcctacaacgccaatgtcggttcaatgaccgccgctgttcaggttctggctgaaatgccgggctaccgcgtgctggtggtgggcgatatggcggaactgggcgctgaaagcgaagcctgccatgtacaggtgggcgaagcggcaaaagctgctggtattgaccgcgtgttaagtgtgggtaaacaaagccatgctatcagcactgccagcggcgttggcgaacatttttccgataaaactgcgcttatcgcgcgtcttaaatcactgattgctgagcaacaggtaattacgattttagttaagggttcacgtagtgctgccatggaagaggtagtacgcgctttacaggagaatgggacatgttagtttggctggccgaacatttggtcaaatattattccggctttaacgtcttttcctatctgacgtttcgcgccatcgtcagcctgctgactgcgctgttcatctcattgtggatgggcccgcgcatgattgctcatttgcaaaaactttcctttggtcaggtagtgcgtaacgacggtcctgaatcacacttcagcaagcgcggtacgccgaccatgggcgggattatgatcctgacggcgattgtgatctccgtgctgctgtgggcttacccgtccaatccgtacgtctggtgcgtactggtggtgctggtaggttacggtgttattggctttgttgatgattatcgcaaagtggtgcgtaaagacaccaagggcctgattgcccgttggaagtatttctggatgtcggtgattgcgctgggtgtcgccttcgcgctgtaccttgtcggcaaagacacgcccgcaacgcagctggtggtcccattctttaaagatgtgatgccgcaactggggttgttctacattctgctggcttacttcgtcattgtgggtactggcaacgcggtaaacctgaccgatggtctcgacggtctggcaattatgccgaccgtatttgtcgccggtggttttgcgctggtggcgtgggcgaccggcaacatgaactttgccagctatttacacataccgtatctacgacacgccggggaactggtcattgtctgtaccgcgatagtcggggcagggctgggcttcctgtggtttaacacctatccggcgcaggtttttatgggcgatgtaggttcgctggcgttaggtggtgcgttaggtattatcgccgtactgctgcgtcaggaattcctgctggtgattatggggggcgtgttcgtggtagaaacgctttccgtcatcctgcaggtcggctcctttaaactgcgcggacagcgtattttccgcatggcaccgattcatcaccactatgaactgaaaggctggccggaaccgcgcgtcattgtgcgtttctggattatttcgctgatgctggtcctgattggtctggcaacgctgaaggtacgttaatcatggctgattaccagggtaaaaatgtcgtcattatcggcctgggcctcaccgggctttcttgcgtggactttttcctcgctcgcggtgtgacgccgcgcgttatggatacgcgtatgacaccgcctggcctggataaattacccgaagccgtagaacgccacacgggcggtctgaatgatgaatggctgatggcggcagatctgattgtcgccagtcccggtattgcactggcgcatccatccttaagcgctgccgctgatgccggaatcgaaatcgttggcgatatcgagctgttctgtcgtgaagcacaagcaccgattgtggcgattaccggttctaacggcaaaagcacggtcaccacgctagtgggtgaaatggcgaaagcggcgggggttaacgttggtgtgggtggcaatattggcctgcctgcgttgatgctgttggatgatgagtgcgaactgtacgtgctggaactgtcgagcttccagctggaaaccacctccagcttacaggcggtagcagcgaccattctgaacgtgactgaagatcatatggatcgctatccgtttggtttacaacagtatcgtgcagcaaaactgcgcatttacgaaaacgcaaaagtttgcgtggttaatgctgatgatgccttaacaatgccgattcgcggtgcggatgaacgctgcgtcagctttggcgtcaacatgggcgactatcacctgaatcatcagcagggcgaaacctggctgcgggtgaaaggcgagaaagtgctgaacgtgaaagaaatgaaactttccgggcagcataactacaccaatgcgctggcggcgctggcgctggcagatgccgcagggttaccgcgtgccagcagcctgaaagcgttaaccacattcactggtctgccgcatcgctttgaagttgtgctggagcataacggtgtgcgctgggttaacgattcaaaagcgaccaacgtcggcagtacggaagcggcgctgaatggcctgcatgtagacggcacgctgcatttgttgctgggtggcgatggtaaatcggcggactttagcccactggcgcgttacctgaatggcgataacgtacgtctgtattgtttcggtcgtgacggcgcgcagctggcggcgctacgcccggaagtggcagaacaaaccgaaactatggaacaggcgatgcgcttgcttgctacgcgtgttcagccgggcgatatggttctgctctccccggcctgtgccagccttgatcaattcaagaactttgaacaacgaggcaatgagtttgcccgtctggcgaaggagttaggttgatgcgtttatctctccctcgcctgaaaatgccgcgcctgccaggattcagtattctggtctggatctccacggcgctaaagggctgggtgatgggctcgcgggaaaaagataccgacagcctgatcatgtacgatcgcaccttactgtggctgaccttcggcctcgcggcgattggctttatcatggtgacctcggcgtcaatgcccatagggcaacgcttaaccaacgatccgttcttcttcgcgaagcgtgatggcgtctatctgatcctggcattcattctggcgatcattacgctgcgtctgccgatggagttctggcaacgctacagtgccacgatgctgctcggatctatcatcctgctgatgatcgttctggtagtgggtagctcggttaaaggggcatcgcgttggatcgatctcggtttgctgcgtattcagcctgcggagctgacaaaactgtcgctgttttgctatatcgccaactatctggtgcgtaaaggcgacgaagtacgtaataacctgcgcggcttcctgaaaccgatgggcgtaattctggtgttggcagtgttactgctggcacagccagaccttggtacggtggtggtgttgtttgtgactacgctggcgatgttgttcctggcgggagcgaaattgtggcagttcattgccattatcggtatgggcatttcagcggttgtgttgctgatcctcgccgaaccgtaccgtatccgccgtgttaccgcattctggaacccgtgggaagatccctttggcagcggctatcagttaacgcaatcgttgatggcgtttggtcgcggtgaactgtggggacaaggtttaggtaactcggtacaaaaactggagtatctgccggaagcgcacactgactttattttcgccattatcggcgaagaactggggtatgtcggtgtggtgctggcacttttaatggtattcttcgtcgcttttcgcgcgatgtcgattggccgcaaagcattagaaattgaccaccgtttttccggttttctcgcctgttctattggtatctggtttagtttccaggcgctggttaacgtaggcgcggcggcggggatgttaccgaccaaaggtctgacattgccgctgatcagttacggtggttcgagcttactgattatgtcgacagccatcatgatgctgttgcgtattgattatgaaacgcgtctggagaaagcgcaggcgtttgtacgaggttcacgatgagtggtcaagggaagcgattaatggtgatggcaggcggaaccggtggacatgtattcccggggctggcggttgcgcaccatctaatggctcagggttggcaagttcgctggctggggactgccgaccgtatggaagcggacttagtgccaaaacatggcatcgaaattgatttcattcgtatctctggtctgcgtggaaaaggtataaaagcactgatagctgcgccgctgcgtatcttcaacgcctggcgtcaggcgcgggcgattatgaaagcgtacaaacctgacgtggtgctcggtatgggcggctatgtatcaggtccaggtggtctggccgcgtggtcgttaggcattccggttgtacttcatgaacaaaacggtattgcgggcttaaccaataaatggctggcgaagattgctaccaaagtgatgcaggcgtttccaggtgctttccctaatgcggaagtggtgggtaacccggtgcgtaccgatgtgctggcgctgccgttgccgcagcaacgtttggctggacgtgaaggtccggttcgtgtgttggtagtgggtggttcccagggcgcacgcattcttaaccagacaatgccgcaggttgctgcgaaactgggtgattcagtcactatctggcatcagagcggcaaaggttcgcaacaatccgttgaacaggcgtatgccgaagcgggacaaccgcagcataaagtgacggaatttattgatgatatggcggcggcgtatgcgtgggcggatgtcgtcgtttgccgctccggtgcgttaacggtgagtgaaatcgccgcggcaggactaccggcgttgtttgtgccgtttcaacataaagaccgtcagcaatactggaatgcgctaccgctggaaaaagcgggcgcagccaaaattatcgagcagtcacagcttagcgtggatgctgtcgccaacaccctggccgggtggtcgcgagaaaccttattaaccatggcagaacgcgcccgcgctgcatccattccggatgccaccgagcgagtggcaaatgaagtgagccgggctgcccgggcgtaattgtagcgatgccttttgcatcgtatgaatttaagaagttaatggcgtaaagaatgaatacacaacaattggcaaaactgcgttccatcgtgcccgaaatgcgtcgcgttcggcacatacattttgtcggcatcggtggtgccggtatgggcggtattgccgaagttctggccaatgaaggttatcagatcagtggttccgatttagcgccaaatccggtcacgcagcagttaatgaatctgggagcgacgatttatttcaaccatcgcccggaaaacgtacgtgatgccagcgtggtcgttgtttccagcgcgatttctgccgataacccggaaattgtcgcagctcatgaagcgcgtattccggtgatccgtcgtgctgaaatgctggctgagttaatgcgttttcgtcatggcatcgccattgccggaacacacggcaaaacgacaaccaccgcgatggtttccagcatctacgcagaagcggggctcgacccaaccttcgttaacggcgggctggtaaaagcggcgggggttcatgcgcgtttggggcatggtcggtacctgattgccgaagcagatgagagtgatgcatcgttcctgcatctgcaaccgatggtggcgattgtcaccaatatcgaagccgaccacatggatacctaccagggcgactttgagaatttaaaacagacttttattaattttctgcataacctgccgttttacggtcgtgcggtgatgtgtgttgatgatccggtgatccgcgaattgttaccgcgtgtggggcgtcagaccacgacttacggcttcagcgaagatgccgacgtgcgtgtagaagattatcagcagattggcccgcaggggcactttacgctgctgcgccaggacaaagagccgatgcgcgtcaccctgaatgcgccaggtcgtcataacgcgctgaacgccgcagctgcggttgcggttgctacggaagagggaattgacgacgaggctattttgcgtgcgctggagagcttccaggggacagggcgccgtttcgatttcctcggtgaattcccgctggagccagtgaatggtaaaagcggtacggcaatgctggtcgatgactacggccaccacccgacggaagtggacgccactattaaagcggcgcgtgcaggctggccggataaaaacctggtaatgctgtttcagccgcaccgttttacccgtacgcgcgacctgtatgatgatttcgccaatgtgctgacgcaggttgataccctgttgatgctggaagtgtatccggctggcgaggcgccaattccgggagcggacagccgttcgctgtgtcgcacaattcgtggacgtgggaaaattgatcccattctggtgccggacccggcgcaggtagccgagatgctggcaccggtattaaccggtaacgacctgattctcgttcagggggctggtaatatcggaaaaattgctcgttctttagctgaaatcaaactgaagccgcaaactccggaggaagaacaacatgactgataaaatcgcggtcctgttgggcgggacctccgctgagcgggaagtttctctgaattctggcgcagcggtgttagccgggctgcgtgaaggcggtattgacgcgtatcctgtcgacccgaaagaagtcgacgtgacgcaactgaagtcgatgggttttcagaaagtgtttatcgcgctacacggtcgcggcggtgaagatggtacgctgcagggcatgctcgagctgatgggcttgccttataccggcagcggagtgatggtatctgcgctttcaatggataaactacgcagcaaacttctgtggcagggtgccggtttaccggtcgcgccgtgggtagcgttaacccgcgcagagtttgaaaaaggccttaacgataagcagttagcagaaatttcttctctgggtttgccggttatcgttaagccgagccgcgaaggttccagtgtgggaatgtcaaaagtagtagcagaaaatgctctacaagatgcattaagattggcatttcagcacgatgaagaagtattgattgaaaaatggctaagtgggccggagttcacggttgcgatactcggtgaagaaattttaccgtcaatacgtattcaaccggccggaaccttctatgattatgaggcgaagtatctctctgatgagacacagtatttctgccccgcaggtctggaagcgttacaagaggccaatttgcaggcattagtgctaaaagcatggacgacgttaggttgcaaaggatggggacgtattgacgttatgctggacagcgatggacagttttatctgctggaagccaatacctcaccgggtatgaccagccacagtctggtaccgatggcggcacgtcaggcaggtatgagcttctcgcagttggtagtacgaattctggaactggcggactaatatgtcgcaggctgctctgaacacgcgaaatagcgaagaagaggtttcttctcgccgcaataatggaacgcgtctggcggggatccttttcctgctgaccgttttaacgacagtgttggtgagcggctgggtcgtgttgggctggatggaagatgcgcaacgcctgccgctctcaaagctggtgttgaccggtgaacgccattacacgcgtaatgacgatatccggcagtcgatcctggcattgggtgagccaggtacctttatgacccaggatgtcaacatcatccagacgcaaatagaacaacgcctgccgtggattaagcaggtgagcgtcagaaagcagtggcctgatgaattgaagattcatctggttgaatatgtgccgattgcgcggtggaatgatcaacatatggtagacgcggaaggaaacaccttcagcgtgccgccagatcgcaccagcaagcaggtgcttccaatgctgtatggcccggaaggcagcgccaatgaagtgttgcagggctatcgcgaaatggggcagatgctggcaaaggacagatttactctgaaggaagcggcgatgaccgcgcgacgttcctggcagttgacgctgaataacgatattaagctcaatcttggccggggcgatacgatgaaacgtttggctcgctttgtagaactttatccggttttacagcagcaggcgcaaaccgatggcaaacggattagctacgttgatttgcgttatgactctggagcggcagtaggctgggcgcccttgccgccagaggaatctactcagcaacaaaatcaggcacaggcagaacaacaatgatcaaggcgacggacagaaaactggtagtaggactggagattggtaccgcgaaggttgccgctttagtaggggaagttctgcccgacggtatggtcaatatcattggcgtgggtagttgcccgtcgcgtggtatggataaaggcggggtgaacgacctcgaatccgtggtcaagtgcgtacaacgcgccattgaccaggcagaattgatggcagattgtcagatctcttcggtatatctggcgctttctggtaagcacatcagctgccagaatgaaattggtatggtgcctatttctgaagaagaagtgacgcaagaagatgtggaaaacgtcgtccataccgcgaaatcggtgcgtgtgcgcgatgagcatcgtgtgctgcatgtgatcccgcaagagtatgcgattgactatcaggaagggatcaagaatccggtagggctttcgggcgtgcggatgcaggcaaaagtgcacctgatcacatgtcacaacgatatggcgaaaaacatcgtcaaagcggttgaacgttgtgggctgaaagttgaccaactgatatttgccggactggcatcaagttattcggtattgacggaagatgaacgtgaactgggtgtctgcgtcgtcgatatcggtggtggtacaatggatatcgccgtttataccggtggggcattgcgccacactaaggtaattccttatgctggcaatgtcgtgaccagtgatatcgcttacgcctttggcacaccgccaagcgacgccgaagcgattaaagttcgccacggttgtgcgctgggctccatcgttggaaaagatgagagcgtggaagtgccgagcgtaggcggtcgtccgccgcggagtctgcaacgtcagaccctggcagaggtgatcgagccgcgctataccgagctgctcaatctggtcaacgaagagatattgcagttgcaggaaaagcttcgccaacaaggggttaaacatcacctggcggcaggcattgtattaaccggtggcgcagcgcagatcgaaggtcttgcagcctgtgctcagcgcgtgtttcatacgcaagtgcgtatcggcgcgccgctgaacattaccggtttaacggattatgctcaggagccgtattattcgacggcggtgggattgcttcactatgggaaagagtcacatcttaacggtgaagctgaagtagaaaaacgtgttacagcatcagttggctcgtggatcaagcgactcaatagttggctgcgaaaagagttttaatttttatgaggccgacgatgattacggcctcaggcgacaggcacaaatcggagagaaactatgtttgaaccaatggaacttaccaatgacgcggtgattaaagtcatcggcgtcggcggcggcggcggtaatgctgttgaacacatggtgcgtgagcgcattgaaggtgttgaattcttcgcggtaaataccgatgcacaagcgctgcgtaaaacagcggttggacagacgattcaaatcggtagcggtatcaccaaaggactgggcgctggcgctaatccagaagttggccgcaatgcggctgatgaggatcgcgatgcactgcgtgcggcgctggaaggtgcagacatggtctttattgctgcgggtatgggtggtggtaccggtacaggtgcagcaccagtcgtcgctgaagtggcaaaagatttgggtatcctgaccgttgctgtcgtcactaagcctttcaactttgaaggcaagaagcgtatggcattcgcggagcaggggatcactgaactgtccaagcatgtggactctctgatcactatcccgaacgacaaactgctgaaagttctgggccgtggtatctccctgctggatgcgtttggcgcagcgaacgatgtactaaaaggcgctgtgcaaggtatcgccgaactgattactcgtccgggtttgatgaacgtggactttgcagacgtacgcaccgtaatgtctgaaatgggctacgcaatgatgggttctggtgtggcgagcggtgaagatcgtgcggaagaagctgctgaaatggctatctcttctccgctgctggaagatatcgacctgtctggcgcacgcggcgtactggtaaacatcacagcgggcttcgacctgcgtctggatgagttcgaaacggtaggtaacaccatccgtgcatttgcttccgacaacgcgaccgtggttatcggtacttctcttgacccggatatgaatgacgagctgcgcgtaactgttgttgcgacaggtatcggcatggacaaacgtcctgaaatcactctggtgactaataagcaggttcagcagccagtgatggatcgctaccagcagcacgggatggctccgctgacccaggagcagaagccggttgctaaagtcgtgaatgacaatgcgccgcaaactgcgaaagagccggattatctggatatcccagcattcctgcgtaagcaagctgattaagaattgactggaatttgggtttcgaggctctttgtgctaaactggcccgccgaatgtatagtacacttcggttggataggtaatttggcgagataatacgatgatcaaacaaaggacacttaaacgtatcgttcaggcgacgggtgtcggtttacataccggcaagaaagtcaccctgacgttacgccctgcgccggccaacaccggggtcatctatcgtcgcaccgacttgaatccaccggtagatttcccggccgatgccaaatctgtgcgtgataccatgctctgtacgtgtctggtcaacgagcatgatgtgcggatttcaaccgtagagcacctcaatgctgctctcgcgggcctgggcatcgataacattgttatcgaagttaacgcgccggaaatcccgatcatggacggcagcgccgctccgtttgtatacctgctgcttgacgccggtatcgacgagttgaactgcgctaagaaatttgttcgcattaaagaaactgttcgtgtcgaagatggcgataagtgggctgaatttaagccgtacaatggtttttctctggatttcaccatcgattttaaccatccggctattgattccagcaaccagcgctatgcgatgaacttctccgctgatgcgtttatgcgccagatcagccgtgcgcgtacgttcggtttcatgcgtgatatcgaatatctgcagtcccgtggtttgtgcctgggcggcagcttcgattgtgccatcgttgttgacgattatcgcgtactgaacgaagacggcctgcgttttgaagacgaatttgtgcgtcacaaaatgctcgatgcgatcggtgacttgttcatgtgtggtcacaatattattggtgcatttaccgcttataaatccggtcatgcactgaataacaaactgctgcaggctgtccttgcaaaacaggaagcctgggaatatgtgaccttccaggacgacgcagaactgccgttggccttcaaagcgccttcagccgtactggcataacgacatttatactgtcgtataaaattcgactggcaaatctggcactctctccggccaggtgaaccagtcgtttttttttgaattttataagagctataaaaaacggtgcgaacgctgttttcttaagcacttttacgcacaacttatcttcattcgtgctgtggacttcaggctttaatgataagatttgtgcgctaaatacgtttgaatacgatcgggatggcaataacgtgagtggaatactgacgcgctggcgacagtttggtaaacgctacttctggccgcatctcttattagggatggtcgcggcgagtttaggtttgcctgcactcagcaatgccgccgaaccaaacgcgcccgcaaaagcgacaacccgcaaccacgagccttcagccaaagttaactttggtcaattggccttgctggaagccaacacgcgccgcccgaattcgaactattccgttgattactggcatcaacatgccattcgcacggtaatccgccatctttccttcgcaatggcaccgcaaacgctgcccgttgctgaagaatctttgcctcttcaggcgcaacatcttgcattactggatacgcttagcgcgcttctgacccaggaaggcacgccgtctgaaaagggttatcgcattgattatgcgcattttaccccacaagcaaaattcagcacgcccgtctggataagccaggcgcaaggcatccgtgctggccctcaacgcctcagctaacaacaataaacctttacttcattttattaactccgcaacgcggggcgtttgagattttattatgctaatcaaattattaactaaagttttcggtagtcgtaacgatcgcaccctgcgccggatgcgcaaagtggtcaacatcatcaatgccatggaaccggagatggaaaaactctccgacgaagaactgaaagggaaaaccgcagagtttcgtgcgcgtctggaaaaaggcgaagtgctggaaaatctgatcccggaagctttcgccgtggtgcgtgaggcaagtaagcgcgtctttggtatgcgtcacttcgacgttcagttactcggcggtatggttcttaacgaacgctgcatcgccgaaatgcgtaccggtgaaggtaaaaccctgaccgcaacgctgcctgcttacctgaacgcactaaccggtaaaggcgtacacgtagttaccgtcaacgactacctggcgcaacgtgacgccgaaaacaaccgtccgctgtttgaattccttggcctgactgtcggtatcaacctgccgggcatgccagcaccggcaaagcgtgaagcctacgctgctgacatcacttacggtacgaacaacgaatacggctttgactacctgcgcgacaacatggcattcagccctgaagaacgtgtacaacgtaaactgcactatgcgctggtggacgaagtggactccatcctcatcgatgaagcgcgtacaccgctgatcatttccggcccagcagaagacagctcggaaatgtataaacgcgtgaataaaattattccgcacctgatccgtcaggaaaaagaagactccgaaaccttccagggcgaaggccacttctcggtggatgaaaaatctcgccaggtgaacctgaccgaacgtggtctggttctgattgaagaactgctggttaaagaaggcatcatggatgaaggtgagtctctgtactctccggccaacatcatgctgatgcaccacgtaacggcggcgctgcgcgctcatgcgctgtttacccgcgacgtcgactacatcgttaaagatggtgaagttatcatcgttgacgaacacaccggtcgtaccatgcagggccgtcgctggtccgatggtctgcaccaggctgtggaagcgaaagaaggtgtgcagatccagaacgaaaaccagacgctggcttcgatcaccttccagaactacttccgtctgtatgaaaaactggcggggatgactggtactgctgataccgaagctttcgaattcagctccatctataagctggatactgtcgttgttccgaccaaccgtccaatgattcgtaaagatctgccggacctggtctacatgactgaagcggaaaaaattcaggcgatcattgaagatatcaaagaacgtactgcgaaaggccagccggtgctggtgggtacaatctccatcgaaaaatcggagctggtgtcaaatgaactgaccaaagccggtattaagcacaacgtcctgaacgccaaattccatgccaacgaagcggcgattgttgctcaggcaggttatccggctgcggtgactatcgcgaccaacatggcgggtcgtggtaccgatattgtgctcggtggtagctggcaggcagaagttgccgcgctggaaaatccgactgcagagcaaattgaaaaaattaaagccgactggcaggtacgtcacgatgcggtactggcagcaggtggcctgcatatcatcggtactgaacgtcacgaatcccgtcgtatcgataaccagctgcgcggtcgttctggtcgtcagggggatgctggttcttctcgtttctacctgtcgatggaagatgcgctgatgcgtatttttgcttccgaccgagtatccggcatgatgcgtaaactgggtatgaagccaggcgaagccattgagcacccgtgggtgaccaaagcgattgccaacgcccagcgtaaagttgaaagccgtaacttcgacattcgtaagcaactgctggaatatgatgacgtggctaacgatcagcgtcgcgccatttactcccagcgtaacgaactgctggatgtcagcgatgtgagcgaaaccatcaacagcattcgtgaagatgtgttcaaagcgaccattgatgcctacattccgccacagtcgctggaagaaatgtgggatattccggggctgcaggaacgtctgaagaacgatttcgacctcgatttgccaattgccgagtggctggataaagaaccagaactgcatgaagagacgctgcgtgagcgcattctggcgcagtccatcgaagtgtatcagcgtaaagaagaagtggttggtgctgagatgatgcgtcacttcgagaaaggcgtcatgctgcaaactctcgactctctgtggaaagagcacctggcagcgatggactatctgcgtcagggtatccacctgcgtggctatgcacagaaagatccgaagcaggaatacaaacgtgaatcgttctccatgtttgcagcgatgctggagtcgttgaaatatgaagttatcagtacgctgagcaaagttcaggtacgtatgcctgaagaggttgaggagctggaacaacagcgtcgtatggaagccgagcgtttagcgcaaatgcagcagcttagccatcaggatgacgactctgcagccgcagctgcactggcggcgcaaaccggtgaacgcaaagtaggacgtaacgatccttgcccgtgtggttctggtaaaaaatacaagcagtgccatggccgcctgcaataaaagctaacagttgaagtaaaaggcgcaggattctgcgccttttttataggtttaagacaatgaaaaagctgcaaattgcggtaggtattattcgcaacgagaacaatgaaatctttataacgcgtcgcgcagcagatgcgcacatggcgaataaactggagtttcccggcggtaaagttgaaatgggcgaaacgccggaacaggcggtggtgcgtgaacttcaggaagaagtcgggattaccccacaacatttttcgctatttgaaaaactggaatatgaattcccggacaggcatataactctgtggttctggctggtcgaaagctgggaaggggagccgtggggtaaagaagggcaacccggtgagtggatgtcgctggtcggtcttaatgccgatgattttccgccagccaatgaaccggtaattgcgaaacttaagcgtgtgtatgccggataaggcgtcacgctgcatccgacatttgcatatgatgcctgatgcgacgctggctgaactgcaccccaaatgttggacataatctgacatctgaaggtgcagtttatgaaacattcatttgaagtaaaacttgccgctgtaaatcattacctggctggtcatgcaggcatcatttctacggcaaaactctttcaactttctcacaccagcctctcacactggattaatctttttcttcttcacggtcctcgggcactggattgcagacacaagcgtagctattctcctgaagataaactttgcgtggttctttatgctctcgggcattctgagtctctaccccgggtagcagcccggtttaacattcccagccacaacacggttaaaaactggataaaaggctaccgcaaatctggtaatgaggcctttatcaggcgcaggaaggagaaaagcatgacccgttctgatgatacccatgaaaacgaggcaaacatgacgccggaagagatgaagaatgagctgcgttatcttcgcgcagaaaatgcatatctgaaagccatgcaggagcatcttctggaaaaaaagcgccaggagctggagaaaaaacgaaagtcatccagagcctgaggtacggacactgccagtctgacctgttaaaggccgcagggcagaagcacgctgtactaccagctgtcactgcagaaggctaaggacaagtatgctgatgtgaaacagctcatagcctccatcttccatgaacaccggggatgttatgggtaccggcggatccattgtgagcttcagaaaagaggtcttaagttcagtggcaaaacggtgagaaaactgatgcaacagctcggcctgaagtctcctgtgcgcctgaagaaataccggtcttaccggggaaatatgggactcgctgcagaaaatatccttcagcgacagttcaaagcggaagctccctgtgagaaatgggtgacagatatcaccgaattcagggctggcggacaaaaactgtacctgtccccgatacttgatttgttttacggggaaatcgtggcgtgggaaacggcctgcaggcctacagaggagctggtgaagcggatgttaaataagggtctggaaagccttgctgaaggggagaaaccgctgctccacagtgatcaaggatggcattaccggataaaaagttatcagtccgccctggcggacagagggttagtgcagagcatgtcgcgcaagggcaacagccttgataatgcggtaatggagaacttctttggtcacctgaaagaagaaatgtactatcgccgggactacagaaatgtagaagagctggaaaatgccgttaacgaatacataacttactggaatcaaaaaagaataaaactcagtcttgggggactcagcccggtagaataccggactgagtatcaaaaagccggttaactgaaactgtccaggttttggggttcagttcatggcgcgttttatcaggccagcgtcgcatcagatagaatgtcactgctttggctcttcgctccagtcatcgctttcggaaagatcgctactgctggggattcgtttttcttcagcagcccattctccgaggtcgatcagctgacaacgtttggagcaaaatggccgaaacgggctgatttcaccccacaccaccgttttcccgcaggttgggcaattcaccgtaatagtttctgacatttttactccttagcaacaggccagttcgaaatccagacgttctggtacctgtccgttttcactgtccagcggcataaaacgaatggcaaaacggctcttatgaccggaaatttgcggataaagctgtgaatcgagcgacagattcaggcgcagcaagtcggcatcgccaccgttatcctgataaaaaccattcaggctggtttgtttacggaagggggccgactggcgaattaaatccagcaccatggtaagtgcctgggtaagtgggttcaggctggcaatccaggtttctacctggctgtcgcgctgcgcctggggtagatgcagccaaatgtgcaatgtaggtaaatcaaagctgcaacagccgcccgggatgctcagtcgctgacgcaccagagcaatcaaacgatcttcacgtagaaattgcccgatacgcggcgcggagattaatacgctccccgccgcttttaactgctgaattaatgcttcaatacggctctggtccacgccgggcacgccaatccaggtctggagtttacgttgctgccggtcaagttctttcaacagctcagtgcggacttcgccgcgctcgaaaacatccagtaattcactgacattacggaagaaatgcagcgcgccagcgtggtcaacgatgggtagattaacggtgagttgctgaatcaaaaactcaatgcgcagccatgtacgcattttttcatttagtggatgttcaaaaaggacctgggtctgcattacggtttttcctgtgagacaaactgcgacgcaagctgcaaatagtatgcgtgcaggcgggcaacatccgatgcgatagcatccggtgcgccgttattatcaatgacgtcatctgccacggcaaggcgagcttcgcgcgttgcctgagcagcaaggatttgttcgacatgctcgcgagttacatcgtcgcgctgcatggtgcgcttaagttgcgtttctgggctgacatccaccaccagcactcgattcgcttttttatacagtgagttttctaccagcaatggcacaacccatagtacatagggggaagtagctcgctggatctggtgttgcgtctcttgctgaatcagcggatgcagcagggcgttaagccagtttttctcttccgggttggcgaagatccgctcgcgcaaggcccggcgctgcaatgttccatcagcagcaatcatgttagcgccaaagtgatcagcaatggcatgtagcgcaggtgcacctggttcaaccacctgacgcgcaataatatcggcatcaatgacgttaattccgagatcagcaaacgcattggcaacggtactcttgccactgccaatgcctcccgttaaggcaactatatacctcataatttatattcccgggaattcatcatgattatcaaaacgttaaaaatgagcgcacgaaagcgaaattgatgaaacgttcgctcactatttaccaggtaaatttatgggattgtagcgtaaaaaaagacaatttcgcagtcttgcgccgcattgattagtgcgtatgataacgtcactggagttgcgctcttacccttatagccattaaccccaggaatccgcacatgcgtattgaagaagatctgaagttaggttttaaagacgttctcatccgccctaaacgctccactcttaaaagccgttccgatgttgaactggaacgtcaattcaccttcaaacattcaggtcagagctggtccggcgtgccgattatcgccgccaatatggacaccgtaggcacattttctatggcctctgcgctggcttcttttgatattctgactgctgtgcataaacactattctgtcgaagagtggcaagcgtttatcaacaattcttccgctgatgtgctgaaacatgtgatggtttctaccggcacgtctgatgcggatttcgaaaaaactaaacagattctcgacctgaacccggcattaaattttgtttgtattgacgtggcgaatggttattccgaacactttgtgcagttcgttgcgaaagcgcgtgaagcgtggccgaccaaaaccatttgtgcaggcaacgtagtgactggtgaaatgtgtgaggagcttatcctctccggtgccgatatcgttaaagttggcattggcccaggttctgtttgtacaactcgcgtcaaaacaggcgtcggttatccgcaactttctgcggtgatcgaatgcgccgatgctgcgcacggtctgggcggaatgatcgtcagcgatggcggctgcaccacgccgggcgatgtcgcgaaagcctttggcggcggtgccgatttcgtaatgcttggcggcatgctggcgggccacgaagagagcggcggtcgcatcgttgaggagaacggcgagaaatttatgctgttctacggcatgagctcagagtctgcgatgaaacgtcacgttggcggcgttgcggaatatcgcgcagcagaaggtaaaaccgttaagctgccgctgcgaggcccggttgaaaataccgcgcgtgatattttgggcggcctgcgttcagcttgtacatacgttggggcttcacgcctgaaagaactgaccaagcgcaccacgtttatccgtgtgcaggaacaagaaaaccgcatcttcaacaacctgtaatataccaacgctggcgtggagcaacacgccagcgttatcccattccactcatcgcatcgcctaaatggaaaattggcagatacattgccaccaccagcgtaccgataattcctcccgttatgatcagcaacgccggttccagtaaggctgcgaggttatccgccagtgccattgtgttatcccgatgatgatgggcgaggttgtctaacatgagatccagcgagccggatgcctctcctgttctcactaattgcaaacagagcgggctaaactcaccggcattttttagcgccagccagatggggtgaccgttactgatatcgtgctggatttgtgtcagaagttgcacccagtacgggcagcgcattgtttctctgacgctctcaacgccctgtaaaaaagaaatgcctgcactttgtgtcagtgtcagaatcgtaaagatctgcgtgagtttttgtccccgcatcagtgaacccataatcgggatgcgtaacagcaatttctgccgtgcgataagcctggttgggtggcgcatcagcagcttattggctatcgccagcagaaagccgaatagcaccagcaaccaaccccattcgccactaaaacttgccagcgtcatgatcccctgcgttagcgccggtagcggagtgttaaaggtcttatagatagcggcaaactccggcagtacaaaatgcagcattgccacaaccaccatgattgccatcgctaaaatgataatgggataacgtaacgctgatttcactttgtcggtcaactgacgctgggctttttgctgacgcgccagttcaaagcagcattcatccagcttaccggtcagttcacccgtgcggatcatcgcctgatagagcggcggaaatacctctgaccagggtaataaggcattggaaaaggcaacgccctgttcaagatcgtgcgccagtgattgcagcaacgcttgccactgcttactgggatgctgttccgccagcagagccagcccttcagaaagcgttaacccggctttgagtagcgtcgccagttgatgaatgacttccgcgcttttatctcctcgccactgcgcagaattgatggcgattcgcttcaggcttagtggggtaaccatctgttgctgtagtgccatgagcagcaaagcacggctctctgcccatagcatcccatcttgcgcattgccgtcgccggttatgccatgccagcgccagagttgcttactcgccatgcggcatccccaatacgcggattaactcttcaaaggtggttaagccttgctccacggccaggcagccgttttcaaaaagcgttcgcatacccgcctgtcgggcgtgcgtttccagcgattcaacgtcggtattagcggaaataagctgacgtatgaccggtgttatgggcagaacttcaaataaggccgtgcgaccataaaaaccgtggtagcaatgtacacaaccgggtgcctgccagtggggcagcggcgatggccatacattgtctggaatatggatgggctccccttgctgccggcgacaatgcgggcaaagtttgcgtaccagacgctgggctattaccagcgtaagcgccgatgatagcatccagcgggcgactcccatttgctgtaaacgtaccagcgtttcgcaggtggaattagtgtgtagggtagacaacaccaggtgaccggtttgcgcggctttaatggcaatttctgccgtttcgccatcgcggatctctccgatcatgatgacgtcaggatcctggcgcaataacgcacgcaaaacgccctgaaaggtgagtccggcacgcgaatggatttgcgtctggtttagtccggctatggggatctcaaccggatcttcgacgctacaaatattaatgtcagcggtattcagcgtttgcagggcactataaagcgtgaccgttttgccgctgcctgtagggccagttaccagcaccagtccctgtggttgttgcaaggcatgagcaaagtccaccagttgtgacggctgcattccaagcgtgttaacatccagtgcctggttcacctgctgtaacaaccttaataccaccttttcaccaccccgacatgctaaggtcgcaatacgaaatgagacggcgtttcctgccagttcgacagtgaattgcccgtcctgcggcaggcgatgttccgcaatatccaggtttcccagcacttttaatctggcggttaatgcgactccggcatccggtgaaacgtccggtaaaggatgcaatacgccgtcgatacgcaagcggatgcggtaggcattgtccgctggttcgatatgaatatcagacgcgcgttgttctagcgcagattgtaacgttcgagtcagcaactctgctttgggctgatgcttctcctgaacagctacgggcaatgtctgttgtgtgcgactggcgtgaccttccatttgttggcgcgtccagcaggtgatctcaatacgtttggtggtagcgaaatgcaatgcgtccagtagctcatgcgaaggtgcatcgactaccgcaacatgaaccacctcttcgctggcatccagcaagactccctgataacgcagacacagggcggtgagctgtggaatattcattgccgctccttagttggcgtcatcaaagcggaagacatcttcgcaggcttgctgcaatgcgctgtcactttgaatagtgcagttacgcgtccagccggtgacgccgtttgcgttatcccaacccggtgtcatgacgacgcttagcccattgagactttcttgcccggtcagcgacaccacgccctttgccacactcatggctgaaacatagcgggtggtggtaggcgaaggaatgccattgctgccaccgtcgcaggtatttaatccaccatgttccagcgcgcacaactctacggcggtacggtaaggcacaaaggtttgtagcatgtcggtgagtgcggctttgcgcaggtagttttgataagcgggaataccaatggcgcttaaaatggcaatgatgccaataaccaccatcagttcgataagtgtaaaaccgcgttgcttgtccatctgtttcgctccttgattgggttggcgctactttggcaaacgccatcagcacaagcgaggggcaaaaaacgaaacgggaaagcagcttccgaggttttttatttcgttgcagcgaaagacaagaaatttgcgaggcgttacgaagaaagttggggaaggggagatttatccgcccgcgatggagcggataaatctgtcagcaattagcgaaaacgcattgaaaggtcgagtgcctgtacgtgtttagttagcgcaccaacggagataaagtccacgcccgtttcggcaaattcgcgcagtgttttgtcagtgacgttgccagacacttccagtagcgccttgccgttggtgcgtttgacggcttcgcgcatctgttctgtttcgaagttatccagcatgatgatatcggcacctgctttcagagcttcatcaagttcttccagattctctacttcgacttctactggcgcatccgggtgcaaccaggacgctttttcgaccgcctggcgcactgagccggaggcaataatatggttttctttgatcaggaaggcatcagaaagccccagacggtgattcgctccgccgccgcaaagtaccgcgtatttcagagctgaacgcaggccgggtaaggttttgcgcgtatccaacagctgcgtgttggtgccttccagtaattcgacatagtggcgtaccttactggcaactcctgaaagggtttgcacaaaattaagcgcagtgcgttcgcccgttaacagcacgcgagatgggccttcaagttcgaacaagggttgattggcgttgatgacatcgccgtcatccacatgccagataatggtgacatcgtcgcctgccagttgaataaacacctcttcaacccagcgtttgccgcaaaatacgccattctcgcgggtgatcactgtggcatgagagcgagagttttccggtaaaagttttgccgtaatgtcattgttggcatcgactgttccgcctaaatcttcccgtagcgcctgggccaccgcgccggggatatcgagattaatgcgttccagcagctcgtcacgtcgggtgtcagggttatagcggcgaggcggcatgttaaaactccagatagctaacgaatcataaggtagaaacatgctactctgaaccgggtattagcaccacatataaggagatcctgcatgttgttagaacaggggtggctggttggcgcgcgccgcgttccctcaccacattacgattgccgcccggatgacgaaacacccaccctgctggtggtgcacaatattagcctgccgccaggcgagtttggcggtccgtggatcgacgcattattcactggaactattgatccgcaggcgcatcctttctttgctgagatcgcccatttgcgcgtctccgctcactgtttgattcgccgtgatggtgaaatagtccagtatgttcctttcgataaacgtgcctggcatgcgggagtctctcagtatcaggggcgtgaacgctgcaatgatttttctattgggattgagctggaaggcaccgatacgctggcgtataccgatgcgcagtatcaacagcttgcggcggttacgcgggcactgattgatcgctatccagatatcgctaataacatgacgggccattgtgatattgcgccggatcggaaaaccgatcccggccctgcatttgattgggcacggtttcgtgcactggtcagcaaggagacaacatgacgctatttacaaccttactggtgttaattttcgagcgcctgtttaagttgggcgagcactggcagcttgatcatcgtcttgaagcgttctttcggcgggtgaaacatttttctctcgggcgcacattaggcatgaccattattgcgatgggcgtgacttttttactgttacgcgcattgcagggagtattgttcaacgttcccacgctgctggtgtggctgctgattggtttgctgtgtattggcgcaggtaaagttcgtcttcattatcatgcttatctgacagctgcttcacgtaatgatagccatgcccgtgccacgatggctggcgaactcaccatgattcacggcgtcccggcaggctgcgataaacgtgagtatttgcgtgagctgcaaaatgcattgctgtggattaactttcgtttttatcttgctccgctgttctggctgattgtggggggaacctggggacccgttacgctgatggggtatgcgtttttgcgtgcatggcaatactggctggcgcgataccagacgccgcatcatcgtttacagtccggcattgatgccgtgcttcatgtactggattgggtgccggttcgtcttgcgggtgtggtatatgccttgatcggtcatggtgagaaagcgttaccggcctggtttgcttcgctgggtgatttccatacttcgcaatatcaggtattaacgcgtctggcacagttctctctggcgcgtgaaccgcatgtcgataaggtggagacgccaaaggcagcggtttcaatggcgaagaaaacctcgttcgtggtcgtggtggttattgcgctactgacgatttacggggcgttggtgtaaagattattgccctcaccctgcacgggtgagggcgtagagagattaatgcgcttttacggctttggcggttttctctttaaacagatagcctatacctaacacgatcagccataccgggatcaggtataccgaaatcgccattcctggggtcatcagcataatcaccagtaccgccgccataaacagcaggcagatccagttacccagcggataaagcagggcagggaagcgagttaccacgccttgttcttgtttggcacgacggaatttcatatgcgccagactgatcatcgcccagttgatgaccagtgcagataccaccagcgccattaacagtccgaaagcggactctggggcaaggtagttaatcagtacgcacaatgccgtaaccagcgcagacaccagaatagtgttaaccggtacgccgcgtttatcgacagacgccagcgcttttggcgcgttcccttgttgtgccagaccgaacagcatacggctgttgcaatatacgcagctgttgtacacggagagcgcagcggtcagtaccacgatattcagcgcattcgctacaaaggtatcgcctaactcgtggaagatcagcacaaacggactggtatcggcggtaacgcgggtccacggcattagtgagagcagaacggctaacgagccaatatagaaaatcaggatgcggtagataacctggttagttgctttcgggatactttgctccgggttatcagcttctgctgcggtgatccccaccagttccagaccaccgaaagagaacatgataatcgccatcatcatcaccagaccggtgaagccgtgtggcaggaaaccaccctgatcccacaggttgctaacgctcgcctgcgggccgccgttgccgctgaatagcagccaggcgccgaagatgatcatcgctaccaccgcgataactttgataatggcaaaccagaactccatctcgccaaacacttttacgtttgtcaggttgatggcgttgatcaccacaaagaacacggcggcagaaacccaggttgggatttccggataccagaactgaatgtatttacccacggcagtcagctctgccatggcaactaaaacgtacagtacccagtagttccagccagaggcgaaaccggcaaaactgccccagtatttataagcaaagtggctaaaggagcctgcgacaggttcttcgaccaccatttcacctagctgacgcatgatcagaaaggcgataaaaccagcaatggcgtaacccaggataatccctggccctgcggattgtattacggaggcgctacccaggaatagccctgtccctatcgcgccacccagcgcgataagctgaatatggcggtttttaaggccgcgctttagctgctcgccgtgctgttgaccttccattatgaaacctcgtgttgtgttgtttttttgaactacgcagcaatgcgtgtgtaattttgtaattccgtttgttgtattggtttctttacattttatgtaactgaattatgatgatagtactttcaactatcacaagataatggtatatgcgcgagaatgcacctgctttatgtagatgtgttgattttctggataaaaaaaaagcaattgtaagtttttcatcacatttaatagatactttaagtctgataacatactgttttaactagctatatgtcggatttgtctgcctgctgaacaccatgccttagccaccagcacaataatcttacaaaaggtcatataagaataaatagatgttaataatacaatggggttgtaacgcgagtatttaaatataatattgcgagctaagtgaaaacgttaagtaattgaaataatttttcattaaaagcgtttcttattgatcgagaaataagttttctatttaatgcaaaaaagttaaggataaacgggaatgaaataaagtgggcgatattgtttacctgagaataatcggtgagaagcagggcgatatttcttcaggctgtgggacgtatgcgtcggttggtaatcgctggcaggttggccatgaagatgaaatttttgcctttgcactcaccaacgccattaccagtactggtaaaggcgttaatctacaggggctacaattttgcaaactcattgataaaagctcaccgctactgtctaatgccatcaatcagaatgagcggttatttattgaaatcgatttgtatcgtataaataaaagcgggcgctgggaacggtattattatattcagctaagaaatgcttcattaactgctattcatgtaaacatttctgacaataatcttcctaccgaatgtgtaaatgttaattatgactacatattatgcaaacatctaatagccaatacggaatttgactggttggcctttcctgctggctataatagcttatttattccacctaaaaacccacctgccagtaatcttaaccctgagccgctaccagttgttaaccttccactctctccaccagcggttaaaccggtctatgccaaatcctgtctgaaggagaagggatgtacagatgccggaacggcagaagaacccgctgaaaacttcgggcaagtagcgatttttgctctgccagtggttgatgactgctgtggataccaccatccggaggctaacgatgttgggcaacccgcagaagctcaaaccatgctactgtttccgggtagtgtgttggcggctcaaatatggggaaaatggtcgctcagtggcatactcagtgcaacccgcggctcttacatcggtgcgttggcatctgctttgtatattccctctgcgggcgagggcagtgctcgtgtgcctggacgtgatgagttctggtatgaggaagaactgcgccagaaagcgcttgcaggcagtaccgccactacccgggtgcgttttttctggggaactgacattcacagcaagccccaggtatatggtgttcatacgggtgaaggtacgccgtatgaaaacgtccgcgtggcgaacatgctgtggaacgaggagaggcagcgttatgaatttacccccgctcacgatgtcgatggccccctgattacctggacgccggaaaatccggaacatgggaatgttccgggccataccggtaacgacaggccgccgctggatcagcccaccattctggtgacgccgattccggacggcaccgatacctataccacgccgccattcccggttcctgatccgaaagaattcaacgattatattctggtttttccggcgggatccggtattaagcccatctatgtttacctgaaggaggatccgcgaaagctgcctggtgttgtaacagggcgcggcgtcctgctttcaccaggaactcgctggctggatatgtcggtatccaataacggcaacggcgcaccaatcccggcgcatattgctgataaattgcgcggacgggagtttaaaacctttgatgagtttcgcgaggcgctgtggctggaggtgagtaaagactcagtgttattggcgcagtttataaaaagtaatcagaataacgttagtcaaggatattccccctatgtccctgaggaggggtattattacggaccaaatgagatagttaagaaattccagatacatcatgtagttgctatagaacatggtggtggagtgtatgatattgataattttaagattgttacgccccgactacatgatgaaattcactacaggagataatgtatatgcgtgatttaaaagataaaatatatttttacacagaaggtgaatttcttgaaatgcttgaggagatagtaaatgcaactagcaaagataaatccctaaaagggaaaaaattagaaaaatatctcgataccttagtggatcatttcattaaaattactgaacatcctaaaaagggagatctcattttctatcctaattcccaagaagatggtgaacctgaaaacatcctgaaaatcgtcaaagaatggcggcgttcacaggggctacccttgtttaaagactctaaataaagtagataataaaactatatatgaaacatcatcgcgtctggctaatgcgatgatgttaataacataaaataataatgtggttgctcttaaaaaacaggtaaaaaatactgaaatcattttatcaatttctcgcgttcaccgataccctttggctggaggtgagtcagtatccggagttgatagcgcagttttcaagtggtaaccaaacacgtataaaacaaggattaaccgcaaaagcacctcttgaaggttggcattatggccctaaagaaatcgttaaaaaattccagatacatcatcgtgttgcaattgaatatggcggcagcgtatacgatattgataatttacgaattgttacccccagactacacgatgagattcactacaggagataaatatgtttaaagaaaagctcgaagattataccgaggaggaatttcttaattttttaggcggattgagatcaactatgaaagatggaaagcccttaaaaggtaaggagctagaaatgtactgggattcattagtagatcattttattgaaattacacagcatccgtcagggagcgatctaattttctaccctaaaagtcaaggagatgataagcctgaaaacatcctgaaaattgtcaaagaatggcggcgttcacaggggctacccttgtttaaagactctaaacaaagtagataataaaactatatggaacatcatcgcgtctggctaatgcgatgatgttaataacataaaataataatgtgggtgctcttaaaaaacaggtaaaatactgaaatctcattaggttattttatcaatttcccgctttcaccgataccctttggctggaggtgagtcagtatccggagttgatagcgcagttttcaagtggtaatcaaacacgtataaaacaaggattaatcgcaaaagcacctcttgaaggttggcattatggccctaaagaaatcgttaaaaaattccacatgtatcattgtgttgcgattgaatatagtggcgaaatttacgatattgataatttaaggagggcacacctcatttgcatgatgaaatttattacaggagatagttaaatgtataattttaaagataaaatagaagattacacagagcgggaattcattgagttgcttggcgagtttacaaatccaaccggggataacgctcaattaaaaggggaagagcttgacaaatattgggatgatctagaagaacatcttaccagaattacacaacatccgttgatgagcgatcttatctactatcctgcaaagaagggagatgataaacctgaaaacatcctgaaaatcgtcaaagaatggcggcgttcgcaaggattgcctttgttcaaagattcagaatgaactctaaacagaatctgtcacctgaaaatcatcacgttctggttaagtgatgattttcgctacgagaaggttacggtggcgattgcagtgataataagcaatgtaaaaagaaaacataggtaaatactacctttctctccttccctgaacattcattttacatattaattcacataattgaattgttatgcgttttgttgcttggtgaatcggttcagaggaaatattttttcgtttcaattctgttaaggtcaccccttggtgggtaaatttaacatttgtgcatagttacagctttgaaacgttatatatgtcaagttgctggccacactcacgtgggtggactggtataacaatcgacgattgctggaaaggctgggccactggccacactcacgtgggtggactggtataacaatcgacgattgctggaaaggctgggccatactcctccggcagaagcagaaaaagcttattatgcttccatcggaaacgatgatctggcagcctgagttcacagataaaacactctccaggaaacccggggcggttcaagttgttaaaatgtgcacagtttcatgatttcaatcaaaacctgtatggacataaggtgaatactttgttactttagcgtcacagacatgaaattggtaagaccaattgacttcggcaagtggcttaagacaggaactcatggcctacagcaaaatccgccaaccaaaactctccgatgtgattgagcagcaactggagtttttgatcctcgaaggcactctccgcccgggcgaaaaactcccaccggaacgcgaactggcaaaacagtttgacgtctcccgtccctcattgcgtgaggcgattcaacgtctcgaagcgaagggcttgttgcttcgtcgccagggtggcggcacttttgtccagagcagcctatggcaaagcttcagcgatccgctggtggagctgctctccgaccatcctgaatcacagtatgacttgctcgaaacacgacacgccctggaaggtatcgccgcttattacgccgcgctgcgtagtaccgatgaagacaaggaacgcatccgtgaactccaccacgccatagagctggcgcagcagtctggcgatctggacgcggaatcaaatgccgtactccagtatcagattgccgtcaccgaagcggcccacaatgtggttctgcttcatctgctaaggtgtatggagccgatgttggctcagaatgtccgccagaacttcgaattgctctattcgcgtcgcgagatgctgccgctggtgagtagtcaccgcacccgcatatttgaagcgattatggccggtaagccggaagaagcgcgcgaagcatcgcatcgccatctggcctttatcgaagaaattttgctcgacagaagccgtgaagagagccgccgtgagcgttctctgcgtcgtctggagcaacgaaagaattagtgatttttctggtaaaaattatccagaagatgttgtaaatcaagcgcatataaaagcgcggcaactaaacgtagaacctgtcttattgagctttccggcgagagttcaatgggacaggttccagaaaactcaacgttattagatagataaggaataacccatgtcagaacgtttcccaaatgacgtggatccgatcgaaactcgcgactggctccaggcgatcgaatcggtcatccgtgaagaaggtgttgagcgtgctcagtatctgatcgaccaactgcttgctgaagcccgcaaaggcggagtcaacgtagctgcaggcaccggtatcagcaactacatcaacaccatccccgttgaagaacaaccggagtatccgggtaatctggaactggaacgccgtattcgttcagctatccgctggaacgccatcatgacggtgctgcgtgcgtcgaaaaaagacctcgaactgggcggccacatggcgtccttccagtcttccgcaaccatttatgatgtgtgctttaaccacttcttccgtgcacgcaacgagcaggatggcggcgacctggtttacttccagggccacatctccccgggcgtgtacgctcgtgctttcctggaaggtcgtctgactcaggagcagctggataacttccgtcaggaagttcacggcaatggcctctcttcctatccgcacccgaaactgatgccggaattctggcagttcccgaccgtatctatgggtctgggtccgattggtgctatttaccaggctaaattcctgaaatatctggaacaccgtggcctgaaagatacctctaaacaaaccgtttacgcgttcctcggcgacggtgaaatggacgaaccggaatccaaaggtgcgatcaccatcgctacccgtgaaaaactggataatctggtcttcgttatcaactgtaacctgcagcgtcttgacggcccggtcaccggtaacggcaagatcatcaacgaactggaaggcatcttcgaaggtgctggctggaacgtgatcaaagtgatgtggggtagccgttgggacgaactgctgcgtaaagataccagcggtaaactgatccagctgatgaacgaaaccgttgacggcgattaccagaccttcaaatcgaaagatggtgcgtatgttcgcgaacacttcttcggtaaatatcctgaaaccgcagcactggttgcagactggactgacgagcagatctgggcactgaaccgtggtggtcacgatccgaagaaaatctacgctgcattcaagaaagcgcaggaaaccaaaggcaaagcgacggtaatccttgctcataccattaaaggttatggcatgggcgacgcggctgaaggtaaaaacatcgcgcaccaggttaagaaaatgaacatggacggcgtgcgtcatatccgcgaccgtttcaatgtgccggtgtctgatgcagatatcgaaaaactgccgtacatcaccttcccggaaggttctgaagagcatacctatctgcacgctcagcgtcagaaactgcacggttatctgccaagccgtcagccgaacttcaccgagaagcttgagctgccgagcctgcaagacttcggcgcgctgctggaagagcagagcaaagagatctctaccactatcgctttcgttcgtgccctgaacgtaatgctgaagaacaagtcgatcaaagacaggctggtaccgatcatcgccgacgaagcgcgtactttcggtatggaaggtctgttccgtcagattggtatttacagcccgaacggtcagcagtacaccccgcaggaccgcgagcaggttgcttactataaagaagacgagaaaggtcagattctgcaggaagggatcaacgagctgggcgcaggttgttcctggctggcagcggcgacctcttacagcaccaacaatctgccgatgatcccgttctacatctattactcgatgttcggtttccagcgtatcggcgatctgtgctgggcggctggcgaccagcaagcgcgtggcttcctgatcggcggtacttccggtcgtaccaccctgaacggcgaaggtctgcagcacgaagatggtcacagccatattcagtcgctgactatcccgaactgtatctcttacgacccggcttacgcttacgaagttgctgtcatcatgcatgacggtctggagcgtatgtacggtgaaaaacaagagaacgtttactactacatcactacgctgaacgaaaactaccatatgccggcaatgccggaaggtgctgaggaaggtatccgtaaaggtatctacaaactcgaaacccttgaaggtagcaaaggtaaagttcagctgctgggctccggttctatcctgcgtcacgtccgtgaagcggcagagatcctggcgaaagattacggcgtaggttctgacgtttatagcgtgacttccttcaccgaactggcgcgtgatggtcaggattgtgaacgctggaacatgctgcacccgctggaaactccgcgcgttccgtatatcgctcaggtgatgaacgacgctccggcagtggcatctaccgactatatgaaactgttcgctgagcaggtccgtacttacgtaccggctgacgactaccgcgtactgggtactgatggcttcggtcgttccgacagccgtgagaacctgcgtcaccactttgaagttgatgcttcttatgtcgtggttgcggcgctgggcgaactggctaaacgtggcgaaatcgataagaaagtggttgctgacgcaatcgccaaattcaacatcgatgcagataaagttaacccgcgtctggcgtaagaggtaaaagaataatggctatcgaaatcaaagtaccggacatcggggctgatgaagttgaaatcaccgagatcctggtcaaagtgggcgacaaagttgaagccgaacagtcgctgatcaccgtagaaggcgacaaagcctctatggaagtaccatctccgcaggcgggtatcgttaaagagatcaaagtctctgttggcgataaaacccagaccggcgcactgattatgattttcgattccgccgatggtgcagcagacgctgcacctgctcaggcagaagagaagaaagaagccgctccggcagcagcacccgcggctgcagcggcaaaagacgttaacgttccggatatcggcagcgacgaagttgaagtgaccgaaatcctggtgaaagttggcgataaagttgaagctgaacagtcgctgatcaccgtagaaggcgacaaggcttctatggaagttccggcaccgtttgctggcaccgtgaaagagatcaaagtgaacgtgggtgacaaagtgtctaccggctcgctgattatgatcttcgaagtcgcgggtgaagctggcgcggcagctccggcggctaaacaggaagcggctccggcagcaggcccctgcatcagcggctggcgtgaaagaagttaacgttccggatatcggtggtgacgaagttgaagtgaccgaagtgatggtgaaagtgggcgacaaagttgccgctgaacagtcactgatcaccgtagaaggcgataaagcttctatggaagttccggctccgtttgcaggcgtcgtgaaggaactgaaagtcaacgttggcgataaagtgaaaactggttcgctgattatgatcttcgaagttgaaggcgcagcgcctgcggcagctcctgcgaaacaggaagcggcagcgccggctccggcagcaaaagctgaagccccggcagcagctccggctgcaaaagccgaaggcaaatctgaatttgctgaaaatgacgcttacgttcacgcgactccgctgatccgccgtctggcacgcgagtttggcgttaacctggcgaaagtgaagggcaccggccgtaaaggtcgtatcctgcgcgaagacgttcaggcttacgtgaaagaagctatcaaacgtgcagaagcagctccggcggcaactggcggtggtatccctggcatgctgccgtggccgaaggtggacttcagcaagtttggtgaaatcgaagaagtggaactgggccgcatccagaaaatctctggtgcgaacctgagccgtaactgggtgatgatcccgcatgttactcacttcgacaaaaccgatatcaccgagctggaagcgttccgtaaacagcagaacgaagaagcggcgaaacgtaagctggatgtgaagatcaccccggttgtcttcatcatgaaagccgttgctgcagctcttgagcagatgcctcgcttcaacagttcgctgtcggaagacggtcagcgtctgaccctgaagaaatacatcaacatcggtgtggcggtggataccccgaacggtctggttgtcccggtattcaaagacgtcaacaagaaaggcatcatcgagctgtctcgcgagctgatgactatttctaagaaagcgcgtgacggtaagctgacagcgggcgaaatgcagggcggttgcttcaccatctccagcatcggcggcctgggtactacccacttcgcgccgattgtgaacgcgccggaagtggctatcctcggcgtttccaagtccgcgatggagccggtgtggaatggtaaagagttcgtgccgcgtctgatgctgccgatttctctctccttcgaccaccgcgtgatcgacggtgctgatggtgcccgtttcattaccatcattaacaacacgctgtctgacattcgccgtctggtgatgtaaataaaagagccggcccaacggccggcttttttctggtaatctcatgaatgtattgagattattagcgaatagacaaatcggttgccgtttgttgtttaaaagttgttaacaattttgtaaaataccgacggatagaacgacccggtggataatgggcgtcataaaaaaaacgtcagacccgccggagataaatatatagaggtcatgatgagtactgaaatcaaaactcaggtcgtggtacttggggcaggccccgcaggttactccgctgccttccgttgcgctgatttaggtctggaaaccgtaatcgtagaacgttacaacactcttggcggtgtttgcctgaacgtcggctgtatcccttctaaagcactgctgcacgtagcaaaagttatcgaagaagccaaagcgctggctgaacacggtatcgtcttcggcgaaccgaaaaccgatatcgacaagattcgtacctggaaagagaaagtaatcaatcagctgaccggtggtctggctggtatggcgaaaggccgcaaagtcaaagtggtcaacggtctgggtaaatttaccggggctaacaccctggaagttgaaggtgagaacggtaaaaccgtgatcaacttcgacaacgcgatcattgcagcgggttctcgcccgattcaactgccgtttattccgcatgaagatccgcgtatctgggactccactgacgcgctggaactgaaagaagtaccagaacgcctgctggtaatgggtggcggtatcatcggtctggaaatgggcaccgtataccacgcgctgggttcacagattgacgtggttgaaatgttcgaccaggtcatcccggcagctgataaagacatcgttaaagtctttaccaagcgtatcagcaagaaattcaacctgatgctggaaaccaaagttaccgccgttgaagcgaaagaagacggcatttatgtgacgatggaaggcaaaaaagcacccgctgaaccgcagcgttacgacgccgtgctggtagcgattggtcgtgtgccgaacggtaaaaacctcgacgcaggcaaagctggcgtggaagttgacgaccgtggtttcatccgcgttgacaaacagctgcgtaccaacgtaccgcacatctttgctatcggcgatatcgtcggtcagccgatgctggcacacaaaggtgttcacgaaggtcacgttgccgctgaagttatcgccggtaagaaacactacttcgatccgaaagttatcccgtccatcgcctataccgaaccagaagttgcatgggtaggtctgactgagaaagaagcgaaagagaaaggcatcagctatgaaaccgccaccttcccgtgggctgcttctggtcgtgctatcgcttccgactgcgcagacggtatgaccaagctgattttcgacaaagaatctcaccgtgtgatcggtggtgcaattgtcggtactaacggtggtgagctgctgggtgaaatcggcctggcaatcgaaatgggttgtgacgctgaagacatcgcactgaccatccatgcgcacccgactctgcacgagtctgtgggcctggcggcagaagtgttcgaaggtagcattaccgacctgccgaacccgaaagcgaagaagaagtaatttttcgtttgccggaacatccggcaaattaagaagcggctattctggccgcttcagattgttgataaagtgctcgtggttgatgccggatgcggcgtaaacgccttatccgacctacaaaatcatgcaaattcaatatattgcatggcttgtgtaggcccgataagcttgcgcatcgggcgattcgatgtttgtcatcagtcttaagcggctaacaacgccgcttttttacgcctgcaatttacctttccagtctccttgctccacgctcagacaaccgttcgcgtaccgctgaccgttgctcattattcaatcgggcagtatggttactgtcgtttagacgctgcgggcggctctcctgaactttctctcgaaaaacctgacgctgctcaggcgaggcagactggatacgctgacgtgctgcatctctttgctgttgattctgcgggttagtctgcattttctcgcgaaccgcctggcgctgctcaggcgacgcggactgaatacgctgacgtgccgcctctcttcgctgctggttctgtgggttagtctgcattttctcgcgagccgcctggcgctgctcaggagaagccgactgataacgctgacgagcggcgtccttttgttgctgggtcagtggctggcgacggctgaagtcgcggaagtcgtcatagctcccatagtgttcagcttcattaaaccgctgtgccgctgcctgacgttgggtatctcgcgtaatgacgggggcggcgtgtgttcgttgctgaaactggcttgctgccgcctgacgctggctgtcgcgtgttggagcaggtagcggcgtggcgctcattccgcctttaacatcggtttggtgaaaccgctttgccatatcctgatcatgataaggcataccatcgcggtaattcggattgtgccgccatgccatattcttatcagtaagatgctcaccggtgatacggttgaaattgttgacgtcgatattgatgttgtcgccgttgtgttgccagtcattaccgtcacgatgaccgccatcgtggtgatgataatcatcatcgtcatgatgatgatggtcatgatcgtcatgatgatgatggtcatgatcgtcgtcgtcccagtcgatgctgctgaatagtgcgtatgtggtagcaacgcccatgctatagccgaatccgcgcacaaagctgtcaacaaacggttctccggctggcggcggcagataaactggcggataagcggtattggcccaactgccgtaaaccacgtttgggttgtagttcggaatataaaccacatccggattggctggctcaatggctattactgtcggtgcaggttctgcgacgacggggctggacgtagaaacggtatttgattgtgtggcaggggcgttggcgggctgatttaccggtacgacttttttcgttgtcgtgatgatcttttgttccgttgatgacttcagcgagccggtttgttgcgccagttgccgcaatcgctgtaccgagtccatcacgtcttgcggctgcgccagaaaagcatcgcccaggttttgcacccattgcgggttttcgcccatcaatgccatcaattgtggaaaggccaccagtgatttaacgctggcgtcccacggctggtcagataccgcctgaatagcagcatcgccttgtttaagtgggttatcgtgcgaccattgtactgcttgcgcaacgtttgtcggataggttgatgccatcagcacctgcgaaagtagggcgtcggggtatagcgcgacaggtgcaacccattgatctatttgagcagtgctgaatgcggatttgacgacggcaggtgttacaggaggcacggaaaccgttgcaggaagcgtaactgcggagatgtcaggcgcagtctgttgtgtcgattgcgcttccacaggcgcttccactgtgcggctttttatatatagcccggcagaggcggcacaaagcccggcactgcaaattagcgccagcacatggggtttaaacggcaaagtcattttcataattcggatctcaaggaaatcgcaatggtcggcgaactgccacccgcaggtgctgtgaatccgagtataaagaggcggtagtttaaattttgactaatcttgggattcgttgaggaaggtgattatcaccatgcgaattaacgaagtttttacggagggaaacaatctctagaccatccttaacgattcagccacttttttatgttgcttttttgtaaacagattaacacatcgtcaaaatcctgctattctgcccgttgcggtactgggcatttaccctacaaactgctgtctcacaggagcgtgaagagaatcgcctgccgcactatgacaatgagagcgaggagaaccgtcgtgctagaagaataccgtaagcacgtagctgagcgtgccgctgaggggattgcgcccaaacccctggatgcaaaccaaatggccgcacttgtagagctgctgaaaaacccgcccgcgggcgaagaagaattcctgttagatctgttaaccaaccgtgttccccctggcgtcgatgaagccgcctatgtcaaagcaggcttcctggctgctgtcgccaaaggcgaagctaaatccccgctgctgactccggaaaaagccattgaactgctgggcactatgcagggtggttacaacattcatccgctgatcgacgcgctggatgatgccaaactggcaccgatcgctgccaaagcactttctcacacgctgctgatgttcgataacttctatgacgtagaagagaaagccaaagcaggcaacgaatatgcgaagcaggtaatgcagtcctgggcggatgccgaatggttcctgaatcgcccggcgctggctgaaaaactgaccgttaccgtcttcaaagtcactggcgaaaccaacaccgatgacctctctccggcaccagatgcgtggtcacgcccggatatcccactgcacgcgctggcgatgctgaaaaacgcccgtgaaggtattgagccagatcagcctggtgttgttggcccgatcaaacagattgaagctctgcaacagaaaggtttcccgctggcgtacgtcggtgacgttgtgggtacgggttcatcgcgtaaatccgccacgaactccgttctgtggtttatgggcgatgatattccacatgtgccgaacaaacgcggcggtggtttgtgcctcggcggtaaaattgcaccaatcttttttaacacgatggaagacgcgggtgcactgccaatcgaagtcgacgtctctaacctgaacatgggcgacgtaattgacgtttacccgtacaaaggtgaagtgcgtaaccacgaaaccggcgaactgctggcaaccttcgaactgaaaaccgacgtgctgattgatgaagtgcgtgctggcggccgtattccgctgattatcgggcgtggcctgaccaccaaagcgcgtgaagcacttggcctgccgcacagcgatgtgttccgtcaggcgaaagatgtcgctgagagcgatcgcggcttctcgctggcgcagaaaatggtaggccgtgcctgtggcgtgaaaggcattcgtccgggcgcgtactgtgaaccgaaaatgacttctgtaggttcccaggacaccaccggcccgatgacccgtgatgaactgaaagacctggcgtgcctgggcttctcggctgacctggtgatgcagtctttctgccacaccgcggcatatccgaagccagttgacgtgaacacgcaccacacgctgccggacttcattatgaaccgtggcggtgtgtcgctgcgtccgggggacggcgtcattcactcctggctgaaccgtatgctgctgccggataccgtcggtaccggtggtgactcccatacccgtttcccgatcggtatctctttcccggcgggttctggtctggtggcatttgcagccgcaacaggcgtaatgccgctggatatgccggaatccgttctggtacgcttcaaaggcaaaatgcagccgggtatcaccctgcgcgatctggtacacgccattccgctgtatgcaatcaaacaaggtctgctgaccgttgagaagaaaggtaagaaaaacatcttctctggccgcattctggaaattgaaggtctgccggatctgaaagttgagcaggcatttgagctgacagatgcgtctgccgagcgttctgctgccggttgtaccatcaagctgaacaaagaaccgatcattgaatacctgaactctaacatcgtcctgctgaagtggatgatcgcggaaggttacggcgatcgtcgtaccctggagcgtcgtattcagggcatggaaaaatggctggcgaatcctgagctgctggaagccgatgcagatgcggaatacgcggcagtgatcgacatcgatctggcggatatcaaagagccaatcctctgtgcaccgaatgacccggacgacgcacgtccgctgtctgcggtacagggcgagaagattgacgaagtatttatcggttcttgcatgactaacatcggtcacttccgtgccgctggtaaactgctggatgcgcacaaaggtcagttgccgacccgcctgtgggtggcaccgccaacgcgtatggacgctgcgcagctgaccgaagaaggctactacagcgtcttcggtaagagtggtgctcgtatcgagatccctggctgttccctgtgtatgggtaaccaggcgcgtgtagcagacggtgcgacggtggtttccacctctacccgtaacttcccgaaccgtttgggtactggcgcgaatgtcttcctggcttctgcggaactggctgctgttgcggcgctgattggcaaactgccgacgccggaagagtaccagacctacgtggcgcaggtagataaaacagccgttgatacttaccgttatctgaacttcgaccagctttctcagtacaccgaaaaagcggacggggtgattttccagactgcggtttaataagtaagcgcacgcgctgcgcataaacgacacaatgcccggtgaatgagattcccgggcattttttatttctaaaccatcgccgttccgctgtttttctccggtaaggctgcgataattacatcaatggcgcaatgcgatttcggcgcattgccgggagcagaggaacacactatggattacgaatttctgcgcgatattaccggagtggtaaaggtgcgcatgtccatggggcatgaagtggtcgggcactggtttaatgaagaggtgaaagaaaacctggccttgcttgatgaagtggaagacgcagcgcgcacgctcaaaggcagcgaacgatcctggcagcgggcagggcatgaatacactctgtggatggacggtgaagaggtgatggttcgcgccaatcaactggaattcgctggcgatgaaatggaagaggggatgaactactacgatgaagagagcttgtcgctgtgcggcgttgaggattttcttcaggtggttgcggcttaccgtaatttcgtgcagcagaagtaagtaaatcaggcggagcctccgtgctccgcctgagacgttaaacagcgggcatattgcgcccgtaataaatctcgcgcatttctttccacagcgcagcggtaatttcctggcgctcgctgtcggttaaatcttccggtttggtgtggaacatgtagtgcttaaggtcgaactctttaagcaacatcttggtatggaagatattctcctgatagacgtttacatccaccatgtcatacagcgccttcatatcttcggacataaagttctgaatcgaattaatctcatggtcgataaagtgcttcataccgttaatgtcgcgggtaaaaccgcgcacgcgataatcaatagtcacaatatcggactcaagctggtggatcaggtaattcagcgccttcagcggagaaatcacgccgcaggtagagacttcaatatcggcgcggaaggtacataaaccgccttcaggatgactttccgggtaggtatgtacgcaaatatgacttttatcgagatgggcaacgaccgtttctggcagtgggccggggtgttctgttttgtcgataagtttcgggtcgaccggttcttcactcaccagaatagtgacgctggcaccttgtggctcgtaatcctggcgggcgatgttaagaatattggccccgataatggaacaggtttctgacaggatttcggtcagacggttggcattatagagttcatcgatataagcaatataaccgtcgcgctcttcggtagttttggcgtagcagatatcgtaaatacaaaaactcagacttttggtcagattattaaagccatgcagtttcagttttttcaatttcttatcttctccttaggacggctgtgaagccagtgcatcttgcagatactggggtaaggcaaaagctgccgtatggactgccggattgtaataacggcatttcaggccagaagcgagaaaacgcgcctgaataatttcggttgagagatggcgtaaggcgtcgttatctgtcgcccatgcaaaggtcatgatgccgccgtaataggtcgggatcgccgcctgataaaagccaacatcgctgaagtaatggctgagtttgcgatggctgtcgatggcctcttcctgctgtaaaaagcagacgccgttttgtgcgacgaagataccgccaggattcaggcaacgtttgcagccttcataaaatgcagaagtaaacagactttcgccgggaccgataggatcggtgcagtcggagataatgacatcaaaggtctggctggtttgattaacgaaattgacaccatcgtcgatcaccagtttaaagcgcggatcgtcgtaactaccggcgttatggttgggaagatactgacggcagaacgacacgacacccgcatcgatttccaccatcgtgattgactcaacgtttttatgtcgggttacttcacgcagcatggcaccgtcgccgccgccgataatcagcacatgtttcgcgtggccgtgggccagtagcggaacatgggtcatcatctcatgatagataaactcgtcacgctcggtggtttgtactacaccatccagcgccattacgcgaccaaatgcggcgttctcaaaaatgatcagatcctggtgatcggtcttttcatgatacagaacgttatctaccgcaaagtactgcccaaactggtcgtgtagcgtttcatgccactgttttttttcggccatgggttgatacctcctttgttaacacccgtaaaaaaatggcgcaacataatagctaacattgaccgcggatgcacggtcaatatttctacaaaaaggtatcagggattatttgacgtaggcaagcaggcttaaggaatcgcgggccagggctttgcactttttagcgacgggaatgccaatgccgctgagatcgcggtagctgtcttcaccgagggctttcatgtcgaaggtgtcgtaattactgagatcccactggttttgctgggcgaaaaagaccagcgcgcgacgaatttgcccgttaggtaagttctggtaaccacaatcgttcttcagaaaaacaaaaactgccgttaaatcggccatatcttcggcttcagactcgctgagcgcgtaactgtttgcgcaaacggccatcaggctgccgaataacactgttctgaaaaacgtcttcattgcttctaccaggggcttaaagaagataaacgttagcacactgcgagcgaggcgacgaccattattgtcgattaaattgtgtctgcggcttgaccttcccgtaaggggaaggactatgctcaacgtttgattttgtttcgcctgcttaagaataaggaaataactatgcaacgtcgtgatttcttgaaatattccgtcgcgctgggtgtggcttcagccttgccgctgtggagccgcgcagtatttgcggcggaacgcccaacgttaccgatccctgatttgctcacgaccgatgcccgtaatcgcattcagttaactattggcgcaggtcagtccacctttggcgggaaaaccgcaactacctggggctataacggcaatctgctggggccggcggtgaaattacagcgtggcaaagcggtaacggttgatatctacaaccaactgacggaagagacgacgttgcactggcacgggctggaagtaccgggtgaagtggacggcggcccgcagggaattattccgtcaggtggcaagcgctcggtgacgttgaacgttgatcaacctgccgctacctgctggttccatccacatcaacatggcaagaccgggcgacaggtggcgatggggctggctggtttggttgtgattgaagatgacgagatcctgaaattaatgctgccaaaacagtggggtattgatgatgtcccggtgattgttcaggataaaaaatttaacgctgacgggcagattgattatcaactggatgtgatgaccgccgctgtgggttggtttggcgatacgttgctgaccaacggtgcaatctacccgcaacacgctgccccgcgtggctggctgcgcctgcgtttgctcaatggctgtaatgcccgctcgctcaatttcgccaccagcgacaatcgcccgctttatgtgattgccagcgacggcggtctgctacctgaaccggtgaaggtgaacgagctgccagtgctgatgggcgagcgttttgaagtgctggtggaggttaacgacaacaaaccctttgacctggtgacgctgccggtcagccagatggggatggcgattgcgccgtttgacaagccgcatccggtaatgcggattcagccgattgccattagtgcctctggtgctttgccagacacattaagtagcctgcctgcgttaccttcgctggaagggctgacggtacgcaagctgcaactttctatggacccaatgctcgatatgatggggatgcagatgctgatggagaaatatggcgatcaggcgatggccgggatggatcacagccagatgatgggccatatggggcacggcaatatgaatcatatgaaccacagcgggaagttcgatttccaccatgccaacaaaatcaacggtcaggcgtttgatatgaataagccgatgtttgcggcggcgaaagggcagtacgaacgttgggttatctctggcgtgggcgacatgatgctgcatccgttccatatccacggtacgcagttccgtatcttgtcagaaaatggcaaaccgccagcgacgcatcgcgcaggctggaaagataccgttaaggtagaaggtaatgtcagcgaagtgctggtgaagtttaatcacgatgcaccgaaagaacatgcttatatggcgcactgccatctgctggagcatgaagatacggggatgatgttagggtttacggtataaaaagaccgtattcggaaatatgcccggatctctccgggcatgaacaaatcgcacgttgtcagcaatctgagcaagccttacttcacatcatccggcagcgcataagccacaatatagtcgcccatcttcgtaccaaatgaaccgtgaccgcctgcggagatcaccacatactgcttgccattcacttcataggtcattggcgtagcctgaccacccgctggtaaacgaccctgccacagtttttcaccgttgctcatgttgtaagcgcgcaggtagttatctgccgtagcggcgataaacagcacgttacccgccgtggagattggcccgccaagcatcggcatacccatattgaacggcaccggtacaggcatcgggaatggcatactgtcctgcggcgtaccaatacgtttcttccacaccacttcattggttttcagatccaatgccgagatatagccccatgctggctgtttacatggcagaccaaacggtgagaggaacgggttgagcgtgacgccatacggtacaccgtactgcggctggatgccggattccgtacccgtgcctttggcatctttcggctgttccatcgggttaccaggaccgcgtgggatcagtttcgaaacaaacggcagtgccattgggttggcaatcgccacttcacgattcggatcaacggaaatcccgccccattcgaacatccccaggttacccgggaagaccagcgtaccctgttcagatggcggcgtgaaaatgccttcatagcgcatctggtggaacatcacgcggcacaccaactggtcaaacatggtggctccccacatatccgcaccgctcaaatctttcgtcggacggaagctcagttccgagaagggttgagtaggggtcacgtaatcgcctttagcagcaccttggggaaccggtttttccggggcaggaaccaccagttcaccattacgacgatcgagcacaaaaatgttgccggttttcgccggagcgtaaataaccggcactttctgaccattaacggtgatgtccgccagcgtcggctgtgccggaagatccatatcccacaggtcgtggtgaacggtctgatagctccacgccagtttcccggtagtggcattcagcgccagaatcgagctggcataacgttcctgttccggtgtgcggttaccaccccagatatctggcgtggtgacgcccatcggcagatagaccagatccagcttcgcgtcataggccgctggtgcccacgagtttggtgagttaaaggtaaaggtgtgttcgtcagacgggatcgcattcggatctttcgcgcccggatcaaaagcccacagcagctccccggtgttgacatcaaaaccacggatcacgccagacgtttcgcgggttgagaagttgtcggtgactgaaccggccatcacgatggttttatcggtgataatcggcggcgaagtcggttcatacagacccggtttggtgtccggcatattgctttgcagattgagcacgcctttattggcgaaggtttcgcacagcttgccgttttcagcgttaattgcaatcagacgaccatcattgaccggaagaatgatacgacgcgggcaatccgccatcacttccggcgaagcagtttctgctttggcttcatgataagagacgccacggcaggttacatgctggaaggactcgttggttttcagctcaggatcgtaatgccatttctctttaccgctggcggcatccagcgcaaacagacgttgatgcgcggtacacaggtaaagggtgtcgcccactttaattggcgtcacttcattggtgatttcgcccggatcgttcggctgcttcacatcgccagtacggaacacccaggcttctttcagcttgtggacgttatcagcgttaatttgcttcagtggtgaaaagcgttgaccttcctgattgcgaccataggcaggccagtcctgatcggcaacgggggagatggcttctgctggcgtggtatcggcgcttaaggtgccgctgatttcctgcggatcgttaaatccggcccaggtcaggataccaccgctaatcagcagtgcgaccaccagtgcggcaactgcgccgctggcaggaatgaccaggcgacgccagacaaacggcaggatcagccagatgccgaagaagaccagaatgtcgctgcgcggagtcagcgcccagaagtcgaaaccaacttcccagacgccccaaatcatagtgccgagcagcagggctgcgtacagccaaagcgcggcgcgtttactgcgccacagcatccaggcgacgccgagcatcacaaggccagcgatagggtagtaccaggagccgccaatcgcgaccagccagcctccgccaatgagtagatacagcccgcaaagcgctgcaaaaagggctgttagcgtgacgagtaatcgccgcgagccggtattgttaattgccataaagagacaccatttcaattcattaatattttagtagcaattaattataggttttaacatgtgtgatcgtcatcacaattcgagctttattaacagattccgcgaatgaatagttttactggtatactgcgtgtcttgcgctttgttgcggtgctgaaacctgcccgtgcgaagtgatttgtttttaaatcatatggttatagatatgaaacatactgtagaagtaatgatccccgaagcggagattaaagcgcgtatcgccgaactgggtcgtcagattactgagcgttacaaagacagcggcagcgatatggtgctggtgggtctgctgcgtggctcatttatgtttatggcggacctgtgccgtgaagttcaggtatctcatgaagtcgactttatgaccgcctccagctacggtagcggcatgtccaccacccgtgatgtgaaaatcctcaaagatctggatgaagatatccgtggcaaggacgtgctgattgttgaagatatcatcgactcggggaatacactgtcgaaagtgcgtgagatcttaagcctgcgcgaaccgaagtcgttggcgatttgtacgctgctggataaaccgtcccgtcgtgaagtgaacgtcccggtagaatttatcggtttctcgatcccggatgagtttgtggtgggttacggcattgattacgcacagcgttaccgtcatctgccgtatatcggcaaagtgattctgctggacgagtaagtgtgaagttgccggatgtgttgcatccggcatggcgaatttatttgtgattgatgtgcttcagcttgaggttggagatcccgtgacggtaacgttgctcaagggtttcgcggttagtcgctgtgacatccagatcacgcagcaagccgtcgtgaatgccgtaggcccagccgtgaatggtaactttctgcccgcgtttccacgctgattgcataatggtggagtggcccaggttatacacctgttccatgacgttcagttcacacaaggtatccagacggcgctcttgcggcatttcgccgagcaatgagctatgtttgaaccagatatcgcggatatgcagcagccagttgttgataagccccagttccgggttttcaactgcggcttgtacgccgccgcaaccgtagtggccacagataataatgtgttcaacttcgagtacatccactgcatactgaaccacggaaaggcagttcaggtcggtgtgaatgaccaggttagcaacattacggtgaacaaagagttcgcccggctcaagaccggttaaacgttctgcaggaacgcgactgtcggaacatccaatccatagaaagcgcggtttttgcgcttgtgccagtttctcaaaaaacccgggatcctcttccaccagcatttttgaccatagtgcattgttgctgatgagtgtatctatgtctttcatggaggttaacgacctgtaaccaaataattacgtttggctaatatagggcaactccgggacgatttaaaccacagataaagtgtaagaacgtaaggtaagtaaaaatttatgaccattgcactggaacttcaacagcttaaaaaaacctatccaggcggcgttcaggcgcttcgtggaatcgatttgcaggtcgaagcgggtgatttttatgcgcttctcgggccgaacggggccggaaaatcgaccactatcggtattatcagctctctggtaaataaaacctccgggcgggtcagcgtatttggttacgatctcgagaaagatgtcgtaaacgctaaacgtcagttgggtctggtgccacaggaatttaacttcaacccgtttgaaaccgtgcagcaaattgtggtgaatcaggcagggtactacggtgtggagcgcaaagaagcgtacattcgcagcgaaaagtatcttaaacaactcgatctatggggaaaacgcaacgaacgtgcgcgtatgttatctggcgggatgaagcgccgtttaatgattgcccgtgcgttaatgcatgaacctaaactactgattctcgacgaaccgaccgcaggcgtggatattgaacttcgccgctcaatgtggggctttttgaaggatttaaacgacaaaggcaccaccatcattctcaccacacactacctggaagaagcagaaatgctgtgccgcaatatcggcattattcaacacggtgagttggtggaaaatacttcgatgaaggcgctgctggcgaagctgaaatcagaaacctttattctcgatctcgcaccgaaaagtccgttaccgaagctcgatggctatcagtatcgactggtagataccgccacgctggaagttgaagtgctgcgtgagcagggcatcaacagcgtatttacgcagttaagtgagcagggcattcaggtattaagtatgcgtaacaaagctaaccgtctggaagagctgtttgtttcactggttaatgaaaaacaaggagatcgcacatgatgcatctttactgggtggcgctaaaaagcatctgggcgaaagagatccatcgctttatgcgtatctgggtgcagacgctggtgccgccagtcatcaccatgaccctttactttattatcttcggtaacctgattggttcgcgtattggcgatatgcatggcttcagctacatgcagttcatcgtaccggggctgatcatgatgtcggtgatcaccaacgcctacgctaacgtcgcgtcatcattttttggtgccaagttccagcgtaatattgaagagctgctggtagcgccggttccgactcatgtcattattgccggatatgtcggtggtggcgtggcgcgtggtctgtttgttggtattttggtgacggcaatttcactgttttttgtgccgtttcaggtgcattcgtgggtattcgttgccttaaccctggtgctcactgcggtgctattctcccttgcgggtttgctgaacggcgtgtttgccaaaacgttcgatgacatcagcctggtgccaacctttgtgttaacgccactcacgtatttgggcggggtgttttactccctgactttgttgccgccgttctggcaagggctgtcgcacctgaacccaatcgtttatatgatcagtggtttccgctacggcttcctcggtatcaatgatgttccgctggtcactacctttggcgtactggtggtctttattgtggcgttttatttgatctgttggtcgctgatccaacgtggacgtggtttgcgtagctaaggctatttcctctcctctggatttgggggagaggagttttgacggctatcaccctttatcaacaatggtcagggtagactgattttcggctaaggaggaaggcgatgttaggttgggtaattacctgtcacgatgaccgggcgcaagagatactggatgcgctggagaaaaaacatggggcacttcttcagtgccgggccgtgaatttctggcgcggattaacctctaatatgctcagccgcatgatgtgcgatgccttgcatgaaacggactctggtgagggcgttatctttttaaccgatatagccggagcgccaccgtaccgcgtggcttcattattaagccacaaacactcccgttgcgaagtgatttctggtgtcacgttaccgttaattgaacagatgatggcttgccgtgaaaccatgaccagttcagcgtttcgcgagcatattgtcgaactgggtgcgccggaggtgagtagtctttggcaccaacaacaaaaaaatccgcctttcgtcctcaaacataatttgtatgagtattaacccgcgattctgatgacgcttttgctacaataaaagcgttgtttcaccctcggttattttttcatgtacaaacaagctgttattctcctgctgatgctgtttaccgcaagcgtcagtgccgcattacctgcccattatatgcaaaccatcgaaaatgccgcggtctgggcgcaaattggtgacaagatggtgacggtggggaatattcgggccggacaaatcattgccgtggagcccactgccgcaagttattacgtatttaattttggctttggtaaagggtttatcgataaaggccatctcgagccggttcaggggcgacaaaaagttgaagatggtttaggtgacctcaacaagccgctgagtaatcagaacttaataacctggaaagatacgccggtttataacgcgccgagtgtgggcagtgcgccatttggagtactggcggacaatttgcgctacccgattttgcataaactgaaagacaggttaaatcaaacctggtatcagatccgcattggcgatcgactggcctatatcagcgcgctggatgcccaacccgataatggcttgccggtgctaacctatcaccatattttgcgcgacgaagaaaacacccgttttcgccatacttcgacgaccacctcggtacgcgctttcaataaccagatggcctggctgcgcgacaggggatacgcgacactgagcatggcgcagctggaaggttacgtgaagaataagatcaatctccctgcgcgagcggtggtaattacctttgatgatggcctcaagtcggtgagccgctatgcgtatcctgtgttgaaacaatatggtatgaaggcgacggcgtttattgttacctcgcgcatcaaacgtcacccgcagaaatggaacccaaaatcgctgcaatttatgagcgtttctgaacttaacgaaattcgcgatgtatttgatttccagtcacatactcattttttgcatcggatagatggttatcggcggcctatattgctgagccgtagtgagcacaatattctgtttgattttgcacgttcacgccgcgctctggcgcaatttaatccacatgttttgtatctttcttatccatttggcggatttaatgacaaagccgtgaaggcagcaaaagaagccggatttcacctggcggtgacgaccatgaaaggcaaagtaaaaccgggggataatccgttgttactaaaacgactttatatcttaagaacggattcgctggagacgatgtcgcggctggtgagtaaccagccgcagggataacaatcaggcaacctgtaccggaatcgctttcgcggtacgtttcatttcgttgtcgccttcaaaataggcgacgttgggtcgccaggtgcgagcttcttcatctggcatggtaacgaagctggcgatgatgacaatatcgccgacgctggcgcagtgggccgccgcaccgttaacagaaataattctcgaaccgcgttctgccgcgatggcataggtggagaaacgcttgccgttggtgacattccagatatcaatggcttcgttttcgagaataccggctgcgtcaagaaaatcctgatcaatggcgcaagaaccttcatagtgcaggtccgcatgagtcactttcacgcggtggagtttgccctgcagcatcgtgcgaatcataacttctacctttctaccctgtcgttaacgaagcaggcgatgcctgctttgaggaaattctcacgcagtattgcccgatttttgtttagtgtctactcatctgacggcatttgcagcagcagtttgcgtaccgtgccgaagcgtgccatgtaacgcctgtaaccaattgaaatttatctgaacgctgctcggtaaacactaaagaggcggctgacgacggcacaccatgactggatactgccttcacgcaagaccacacggaaggcagggaagatggatgcaccgagtaccacaccgcatgatgcggtgtttaaacaatttttaatgcatgcggaaacggctcgcgactttctggatatccatttgccagcggagctacgcgaactgtgtgacctcgacacgctgcatcttgagtcggggagttttattgaagaaagcctgaaagggcacagcactgacgtgctttattccgtgcaaatgcagggcaaccccggttatttgcatgttgtgattgaacatcaaagcaagccggataagaaaatggcctttcgcatgatgcgttattctattgctgccatgcaccggcatctggaggctgaccacgataagctgccgctggtggtgccaattctgttttatcagggcgaggccacaccttatccgctatcaatgtgctggtttgatatgttttactcaccggaactggcgcgacgcgtctataacagtcctttcccgctggtggatatcactatcacaccggatgacgaaatcatgcaacatcggcggattgcgattctcgaactgctgcaaaaacatattcgccagcgcgacttaatgttattgctggagcaactggtcacgctgattgacgaagggtacactagcggaagtcagttagttgccatgcaaaactatatgctgcaacgcggtcatactgaacaagcggatttgttttatggtgtgctgagagacagggaaacgggagggaagtctatgatgacgctggcgcagtggtttgaagagaagggaattgagaagggaattgagaagggaattgagaagggaatggagaaagggattgagaaggggattcagcagggaagacaggaagtaagtcaggaattcgccctgcgtcttctaagtaaaggaatgcctcgggaagacgttgcagagatggcaaatttacctcttgctgagattgataaactgattaactaagttatctgcattatcagttttagccagataattgttattgttaactgaccagataattaagggaacatatggaaataaagacacggagagaaaccaggcagacgttggcgcagtggtttgaagagaagggaaggcaggcggttagacaggaggtaagtcaggaattcgcccaacgttttctgaataaagggatgtctcgggaagacgttgcagaggtgacagctttatctcttgcagagattgataagctaattaactctaactaagttgtctacgatatgaataattgcttacagatgacgtggcaatgaataactggcgccatcagccgtagcgccagttaagtattacgccagttcgaccattttgttgtcgatcaggcgggcatcgccaagccaggcggctaccagaatcactgcacgtttgctgttttcagagacttccagcaatgtgtcggcatcgcgaatctgaatatcatcggcgcggaagcctttttcattcagttcttgcccggcaatagcaataatttcatcgagatcccgttcaccagcctgtaatttatcggcaatcgaacttaaaaccttgtacagaccgggcgcaattttgcgttgttccgccgtcagataaccgttacgggaactcagcgccagaccgtctttggcgcgcataatcggcacgccgacaatctcaatatcaaagcccatatcggcaaccattttgcggatcagtgccagttgctgaaaatctttttcaccgaagcaagcgatatctggctggaccaggttgaacagcttgctgacaatagtcgaaacgccgcgaaaatgtcccggacggctggcaccttccagcatggtggaaagaccgggaacatcaacataggtgtgggtttcagtaccgttcgggtagatctcttttaccgaaggcgcgaaaactaaatccactttacgtttgttcagcttttcgcagtcctcttgcaaggtccgtggataacgtgccagatcttccgggcggtcaaactgcattgggttaacgaaaatactgacgacgaccacatcggcgcgggctttggcttcgtcgaccagcttcatatggccgtcgtgcaggttacccatggtgggcaccagcggccacgcgcttaccttccatacgcaggcggcggatttgctgacgcagcagcggcagggtttcgataattaacacaacgtcactccttaatggaaactgtgttcttcgcccgggtaaacgccggactccacttcagccatatactgccgcacagccgcgcggatgtcgcccgtttcggcgaggaaatttttggcgaatttaggaatatgaccgccggtaatgccgaacgcgtcgtgcatcacgagaatttgcccgtcagtgacgttgcctgcgccaataccgataaccgggattgccagtgcttcggtaatgcgttttgccagttcaaccggcacgcactccagtaccagcagttgtgccccagcagcttctaatgccaatgcatcgctgagcagtcgatcgcccgcttcatcgccgcgcccctggactttgtagccaccgaaaatattcactgactgtggggttaggcctaaatgaccacaaactggaacggcacgttcggtcagcatttgtacggtttccaccagccactcaccgccttcaattttgaccatgttggctccggcacgcattaccgttgcggcgttttcaaaggcttgttccggcgtggcatacgccataaatggcaggtctgctaacagaaggcagtttggcgcaccgcggcgcacagcggcggtgtgataggcgatatcagcaacggtaaccggtagcgtggagtcatgcccctgaaccgtcatgcccagtgaatcgcctaccagcatgacgttaagtccttcttcggcaaacagtttagcgaagctgtagtcgtaagcggtgatggtcgcaaaacgctttttatcctgcttgcatttctgcaatgaagcaatcgtggttggtttcatagcgtatcctgataaatgatgttgtgctgtctcgcattttatcagtcacattggtgggggcaatgatttatccgtatcgcaccgccgttgtctggcggtgcgatagtgttatcaggggtaggtaacctgaaaagtgctggtggctttaaaatcccccggttctatagcaatattaccgtcttgttttaatgtagcctggaaatgaagaggttgtgaggtaccgtttcctttatccgggtaaattcctccggtagtgtcatcttctgtttcgtaatctttataaacagacgttgaatcatttggtttcagtaccatttgtgcacttttagtgttttttaaaccttcaatcagtacgccaacgccttttgctgcgtcatttcctgtgagtgtgttagccagaagttctttgcttacactacccaccttgtttgacttgagttttgtttctatattgcgaacacgaatacagttctgtagcgtgatatcaaaaggaaccgctgttgcgccattttttatttgtgcagggctataatcacccattttaaccgttgaaccacttaccgatgggccagtaagtgcagcagtaaaacacgttgggttggataacgtcatattatccaggtcaaaatctattttaaggaaatagctgtgcccgttgataccgccaccaagaccatatcctttgaatgagtagagataaccacccggcttagataatgttaccttgtttgtctttgtggggtcaaagttggtatcggtataaaattccaccgtgagcgactgccaaactccacctacggcccagtatttattagatgagtttgcattgttacaagaccaatatagagtggcttcactttcggggatccaccgaaaatattgagttggagaatcgccgatatacatacctgatgaactgatattggttgtggtgtatgatgaccaaatgtttgatatctttaatgtataatacaggcctgggacagatgtttcaaatagtttatgcccgccataacgtttacccgaatcaaccatttgattttcaattgccataggctcaccgcttgcagtgttacttctgttgcagtaaaggtaacctccacctgaagcgctatttaactgagaccagtataatgacacacctgttggtccgagttgggttggtttataaaaaactaagttatttgtgcttgttgaatacctgaatttgacagtaatgtctgcactggggcctgtttctctccacttttggtctcccggacccactccgtaatcattcccaacaagatagctgacgttatcatcggtgccggcacttgctgtataacaacaagagcatagtgctaaaaaaagaaagtatctgaagaatgtcttcatttttactccattgtcatgctgcaagataatacttgtagcactttgtctgttattcgtagtaaatatccactaacacatggcttatcagtgggccagaggtgacattcagcgctggatcgattttttgcattcgggtgctaaatttccaggatgaattgtttagtgctgatgacatgaccggataaacggaacgtgagctaccagtggcactaagaacgttgaaggtatttgccgggtcctgaatagaaaatataactaccccaacatttttagccccggcgttgtcttcattagcgaatatttgactggaacctgtcgccattacgccactaagtgcgcgaaaattaatatgtaactgatttaacacattccctgtgccctgaagtgtgcagtcctgtactgtaatagtgaattcttttccaccggggtgataattttcggctgaaatgtttccggtaaaatcgcccacgccaacgacacctaaatcaatatttccgttgttgctgattccactttggcaggtgttattttttatatttgcaacaatgtcaacatcctgtcctgcaaccacaggggaagtggcgctgaatagcaacgacagaagcagaattgattttttcatcagattacgttgagtgggacgcatatttagttcctgaatcagtctgcctgttagttataagtcacggtgaatgttgccggggcagtgaaatcacccgcagtgacatttgtgacagttttatcttttgcgaccaccaacaccgcactcattgggtaatcgacaacattgctgcccgttgcattagcaatactgacttcttctgttgcgggggtgacacaactgaattgtttagcgccgttcttacctggcgtagatgtgctccagacctcaacggcgaccgccgctgcttttgctgttgccgttgatgcgttagcaaatccaggaccattattagaattaccttcacataatgctcgtgtagtcaattttatttttgcctttttcccgggaatccccgcacagtctttgaactgtaatttgaaggttttaattttagttttggcattaatttcagaaatatatacatcaccgaaattgatggtggaaattttagttgtaccgtcatcagtcaacgttgatgtacaggtacccatttctacgtcagtagtaacagtcaggccaatactgtcagtggctgcatgcgaaggaatggtaaacagtgatgaagccagaaatagactacccgataatccataacataatttttttaatatcatcattgtcatccttgttattgatagctgaagttaaaagttgccagtgcgcgaaacttgcctggaacaccttgccctacacttgtttcacgcagtgcgacagtcatctcaagtccatcggtgctaatttctgatgcactccagcgtatgtattctgtgctattgggtttcagaaatgtatcgcctgaggtcgctttccttttaaatcccattccgatatagcttgtagtggaggttgtatcactggccagggggataattagcgcgggtgaacttcctgattgatttcctgtcagggttgtatcaatccagctaattccactgctgcatccattggctaccaatttaaagttggcttcagattgtgctgttttattggctattttatccattcccatcgagggaataactaaggtgtacttatcatttccattatcagtgacattagttccggtaagtgtaatattacaggttgttgctttcacggtagcggtaaaatcgacattaacatccgttgcaaataccgaaggcgataacaatagtcccatgagtattgttattttatgtggtgtgatttttatcattggaagtcccttgtagttactgtatctgacaacgaagcccgttaagaataatagattgtgctattttttctgatgtcgtgttttgttggtaatgagcaaaacaactgactggtttgccctcttcaatccaggtaattcgtatatttccttcctgttcgatgccgcgaacaaaggcctgaccaccctgacctacgttgccgatgatattgttttgttcatcataaatatccgctgcaaatggaatatttttaccatcgcttcgcacgatattcataattgccgattgtccctgaactgtttcaaaatcagcaaagacgacggctccctggcgcgggacggcgacagtactggtgcttttcaattcaacatcgttttccagatcgttaatgtccagtgcgatacgattttcatggtatggcgaaagggcgctggtcacaccataaccccagcggtctacggtgctgtttccgtagttaatacgagcgccttttgctcctggcgcctgaatgacagccagagtgtcggaatcactaaaactgtcattactgaacgtcagcccgccgctatgtaacacaaatccaccatcagtattgagtgagaattggcgactattatcactacttgctgaggctgaacctgacagcgttccccacggcgattcataactggcataaccgccgatataactcaaatcatcactggatttattcatcatataacccgtgtttacgctgtagctgatgcgattggtatcgctgtaaccactactgctgatattgagttggttattacccttaaagtcgctgtttaattgtgtatcaatactctggaagccggagctacggtgttccgtacccagtaaattttctattggaatcgtgaagctgagataaatgctatcgtcggtttgaccatcttcattcaacgaacgttgagcactgatactgtaactgccccaggacgcactattgctataaccaatagagtaattagtactgttttgcccggaggcccagtaatctgaccagcttcccgagagataaaatgaaccgtaatcctttttctcaaatttcagcggttggttgatactgaccgtgacctgatttttcatgcgcgagtaattgcgcatggatttaggctcaagatcttgctcaggatgttctacttcatcaatcagcgtcagcgcatcattgaggcccagataatgctgggtggagtagcgataggccgcgatatttaatgatgtactggtattttcaaataacttgttccaggaaatacggtagctttgtccttgataggttttatcgtccggaatgctgacatttgagtgagtaacatcgacagaaaaagcccccacgggggtattcataccaagccccagcaatccggcggtatagttattatcagttagctgaataccggtatatcctgtcaggtagttattcaaaccatagtagtagctggcttgaaataaattaggctcatcctggatactgtcttttaaaacctgaccggcgctaatatcccagcgaccaacgccagggcgcagcatttgcacaacagatgaaaatggctgggagaacgtccgttttgtgccatcagcttcttcgatagtcacaatgagatcgctgccataacctgacgggctaagatcgtcaatggcaaaagcccctggcggcaccgtcgtttcatagatcttataaccattttgcataacggttactttggcattggtattcgctacgccatgaatgattggcgcaaaactggctaataccggaggcagcattcgactgtcactgtataagcgaataccgcgaatgctgactgaatcgaaggtctcgccggtcgtgtaagattcaccaataaccagttgtgaacgtagtgacgcaagatcgcgttgtaaatagcgattctgaaaatcgtaatcgctatggacattggtcatccagttgtagttacctgaggcacgtaaccgccacgcgcctaagtttatcccaccgttgaatgccgcatagatactgtcatttgttctgcctggactttcactgtgatatccattgaggttgtaggaaagcatggctgcattaatgccattttcccacaaagagggatcaacatagttttgataattcttcataatccatgcctgggggacatcgatatccaggcgttgatcgttaacatcgtaacgaatggatgattgagggatcatttcagccagattgaggcaatcaccaagatcgtcgtctcgcttaagcaaaatggctttttcgctattcttgtctggtgaactgatatgaaattgcaataaatttttctgcgtaatgcaggcctgagcgttctttttaccttcaataacagcaaaagcaatgctttggctcatgatgggttgatcgttaacatacacactgacatcgtaaatgccaggtagtgtgggattgccttctgtataccgactaaggtcgatatttgaagcatcctttcccatcagaaatgtatggtcatattcgacgagttcagcgcataaagcactattgctatacagcagagcgcaaaacgtggcgatgtgggtaaggtgattagtagatttaatagtcacgttctgcttcctgctgtgttatatccttgccagattaaaggttggcgttgccttcaatagatccaccaaaatcattaatggcgaaaaaatgcacttttgcagagcttgttctgccactcatcccatttaccttgatgacgtcgttactgaacggcgcaatcattgtcatatccaggggatagcgtttgccgttggcttctaaatcaccactgctaaaagagacatagtagggcgtagggttatcaacgcgtaatgctgctttgccttcagatgttgcccaggaccacttcagagccaatggtgcatcagatgaaattccactcaatccttccgggcgatagaacagttttatacgtgtgcgaaatgccagttgtagcaggctttgatttgctgcttttgctgcatcgggttttggtggaacttccagtacgttaaaccagaacacactttctctgtcttttggcagagcactactggcggtgtacatcagtttgattgtttggccacgtttagcatcaatacgtgatactggtggcgtagcggtaaaggggacagtaatactgcctggttcagcgttatcatctccagtatctaaccaactctgaaccagcaatgggttattgcctttattttccagacgtacattgacgcttttttgttcgcttttataaactacgcgtgtacctgaaattacgatgtctgcaatagctgatgagctaaaagccatacagctcgctaagcacaatgctgcggtatgtttagtattaaaaaacataaaccattccttacagaattaattaaaacagggaataattatcaaaagtaaaaatatttgatgttattccctgtatatattcacccgatcaatttaagcggttgatatttactggtaagtaatggtatatgctgagttggtttttacataaccggcagtagctgctttgcttgcatccgcacgaacataggatgctttaaaatcgtaggttgcagatttagacgttgaatccagagttttgctgtaaacatcacccggattattgacctgaacctgtttaatagtagaaccttcaatattgtgcagagcgatatttacgccgtcagacggggtgttaatagacatgtcgttgttcagtgttcctttgctgttaccaaagaaaacagaaccgaaggtcatttttgcagtagtacccggagccgggttagctttgctgcagtcaatagtaatgctgaatggtttagctttagcacctacagtggtatccagtacaccatcagtaatttcagcaacagtagcggtttgcagcaggatcagaccgtctttgttaccgccatcaacacgagcttcacaagtgttatcaacgaccagaccgctaatatttaattgaccgccgtccatatcgttagcagcaaatgcagtaccagcagccattgccaacataataccggacagcgcaaaacctaattttttagacataaaaatccttgagtaatattccataaagcagataacagcattgcatgatgatgagattttgatgcaatgccatgtaactgaacgttactttgttaatgatgtttgtttgttttttactaagtattacattcattcatcattgggacagctattttgcataatgccatgacatatgcaatttaattttactaaatatgaaaattagtaaaattaactttaaaaaattaagggagtggtgtatggaattagaatttcgggaaggtatattatattttctgtgtttttatttatcttaaatatattattatttgcaatagcttaaggttatttttcggaatatatttatattcacacgaaaaataattaccacttatctaattcattaaagccttttgcctgtagagcttcaactaatgataagccatcaggaaataccaattccggcgcaatttcaaacagtggccacagcataaagccgcgatttttcatatcgtagtgcggaacggtcagacgttcggtatttattacttcattaccaaacagcatgatgtcgagatccagcgtgcgcggtccccagcgttcagctttacggacgcgaccttgctgcaattcgatacgttgtgtgtgattgagtagctcttcaggggcaagagtggttttcagcgcgacggcggcatttaagtaatcgggttgatcttgcggccccagcggtggggtgcggtaaaacgaagaaacagcaagaatgcggctttctggaatatcgcctaatgctttcagggcagcattgacctgctccagcggagaggccagattgctgcctatggcaatatacgccactgtcatgcggtaccctcacgacgcggtgcgcgtttgcgtggacgacgagtacgacgacgcggtgacggttcttcatccagttcgttaagcatccctttttggtctggtggcgcggaaacctggaactcaccccaccatttcaccagacgttgcagttcagcgttacgctcaacttcggctcgtaaggccaacaggtcgtatgccgcacggaacttaggatgctccagcagtttccatgcgcgtttaccctgacgacgggacatacgcaactgcaactgccagatatcgcgggttagcgtggtcagccgtttcgggatcgccagtgaacggcaggcttcgtccagcacgtcgttcatcgccagtgcgaaagcgtcgtgataggtcaggccgctttcctgggcgatcttctgtgccgtctccagcaatgggtaccagaacatggcggcaaacaggaacgccgggttcacgcgcatatcgttatggatacgcgtatcggtattcttcagtacctgctcaataatgcgttccatcgggctgtcgccattttccgtgaagtagcgggtaatggtcgggaacagcggctggaacagatgatattcacacagcagcttataggtttcgtaaccgtagcccgcttgtagcagtttaagcgattcttcaaacaggcgtgccggtgggatatcgttcagcagggtagcgaggcgagggatcggttctgcggtttccgggctgatgcgcatgcccaatttggcggcaaaacgaaccgcgcggagcatacgtaccggatcttcacggtagcgcgtttccgggttaccaatcagacggataacgccgtctttcagatccttcatgccgccaacgtaatcacggacggtaaaatctgccacgctgtaatacaggctgttgatagtgaaatcgcggcgctgggcgtcttcttcgatggagccgaaaatgttgtcgcgcagcaacatgccgttttgcccgcgttgggaggtcgtgcggtcgctgacgttaccttcgtgatgtccacggaaggtcgcaacttcgataatctccgggccaaacatcacatgagccagacggaaacggcgacccaccaggcggcagttacggaacagtttgcgcacctgctctggcgtggcgttggtggtcacgtcaaaatctttcggctttttgccaagtaacaggtcgcgcacgccgccgccaaccagccaggcttcgtatcccgctttattgagcctgtacattaccttcagggcattttcactgatatctttgcgggaaatagcatgctgctcacgcgggatcaccgtcacctgtggacgggcgactgcctgttcagcctcgctttcctcgcggcttagcaccttgcggcaaaaattagcgactcgggtaaaaatagtacacctcggtagtgtcaaacatcattcaggacaaaaaaatagcggctaatcatagctcagcatgacgcatttgagaatgttgaatttacaattgccgactcaggcacggcggtcagcgtccagtttttgacggctgactgaaggatttgctcgacgctgaaatcctgccagtgtgtttctacctgctgacccagaaaatgaagtgccgcgattaacaccgggcgcggatcgcctttcggcaacgcaggcgcatgattctgcttggaaagtttagcgccttgtggattaagcgccagcggtaaatggatgtaatctggcactttccagccaaaaagctggtacagcgagatttgccgcaccgtcggttcgatcaaatctgccccgcggacaatttcgctcacgccctggaagtgatcatccaccaccaccgccaggttataggcaaacaaaccatcacggcgatgaataataaaatcttcccgtgccagtttttcgtcggcgtgaataatgcctcgcagcagatcagtaaactgggtgaccggatgctgctggcggatacgtactgcggcgttgtctggtccatgatgcaaatcccggcaatgaccgtcgtaaataccgccaatgctttgaatacgcgcacgcgtgcaggtgcagtaataacttagtccttgctcatgtaaccaggcgagtgcttcgcgataggcgtggtgacgttgcgattgccagagaacgtcgccgtcccagtacaggccgtaatgttccagctggcgcaggatagtttctgcggcaccgggaacttcacgaggcgggtcgatatcttcaatgcgtaccagccagcgaccttgccgggcgcgagcctgcaaatagctgccaagcgcagcaatcagagaaccaaaatgaagctcgccggaaggagagggggcgaagcggccaatatagtgtgtgtctgtcatctctttgaacaaaaaataaggcgggagcatttcccgcctgtggtaaacgtgatggaacggctgtaattagccagccatctgtttttcgcgaatttcagccagcgttttgcagtcgatgcacagatcggctgtcgggcgcgcttccagacggcgaataccgatttcaacaccgcaggattcgcagtagccgaaatcttcgtcttccacttttttcagcgtcttctcgatctttttgatcagcttacgctcgcgatcgcggttacgcagttcgaggctgaactcttcttcctgggctgcacggtctaccgggtccgggaagttggctgcttcatcctgcatatgtgtaacggtgcgatcgacttcatccctgagttgattacgccatgcttccagaatacgacggaagtgcgccagctgggcttcattcatatactcttcgcccggcttctcctgatatggttccaccccagcgatggcgagaatactcagggacgatgttttacggttttgcccttcttgcatgttgcttctccttaacacgcactatcgatccccatgttcgggggaaaaatgaggccgctataaatagcagatgcttttccggatagcaattatctaaacgtaacacttgacaactgtgtgaggaaaagcgtatttgcgcacgcgaccagaatgtaaattaaccagttacttactctactacaatgtaaccggtagtgattttttaagagccatgccttcggcagaaagttccgctttgtaagccagaatttctacccccctctgttgagcttctgacaatagttgcgcgtatttctcatcgatgtggcgcgcgggtgaaaaccgtgtaatggctgaatgcagcacggcgaaaaagataaccgcacgctggccttcagccgctacgctcatcaactcccgaaggtgtttctgacctcgttcagtgaccgcatcgggaaaatatccctgttcgttctccgctaacgtaaccgatttcacttcaatatagcagtctggacgcgaatccgcctgcaacataaagtcaatacggctgcgttcggcgccgtattttacttcgcttttcagcgagctatagcctgccagctctgaaattgattcattaaggatagcctctttcgtcaacctgttagcccaaagcgtattgacgcaaataattgcgccgctctggctttgagttaattcccaggtgtgtgggtatttccgtttggtgttgtctgaagtcgaataccgtaatgttccagctggcgcaggatagtttctgcggcaccgggaacttcacgaggcgggtcgatatcttcaatgcgtaccagccagcgaccttgccgggcgcgagcctgcaaatagctgccaagcgcagcaatcagagaaccaaaatgaagctcgccggaaggagagggggcgaagcggccaatatagtgtgtgtctgtcatctctttgaacaaaaaataaggcgggagcatttcccgcctgtggtaaacgtgatggaacggctgtaattagccagccatctgtttttcgcgaatttcagccagcgttttgcagtcgatgcacagatcggctgtcgggcgcgcttccagacggcgaataccgatttcaacaccgcaggattcgcagtagccgaaatcttcgtcttccacttttttcagcgtcttctcgatctttttgatcagcttacgctcgcgatcgcggttacgcagttcgaggctgaactcttcttcctgggctgcacggtctaccgggtccgggaagttggctgcttcatcctgcatatgtgtaacggtgcgatcgacttcatccctgagttgattacgccatgcttccagaatacgacggaagtgcgccagctgggcttcattcatatactcttcgcccggcttctcctgatatggttccaccccagcgatggcgagaatactcagggacgatgttttacggttttgcccttcttgcatgttgcttctccttaacacgcactatcgatccccatgttcgggggaaaaatgaggccgctataaatagcagatgcttttccggatagcaattatctaaacgtaacacttgacaactgtgtgaggaaaagcgtatttgcgcacgcgaccagaatgtaaattaaccagttacttactctactacaatgtaaccggtagtgattttttaagagccatgccttcggcagaaagttccgctttgtaagccagaatttctacccccctctgttgagcttctgacaatagttgcgcgtatttctcatcgatgtggcgcgcgggtgaaaaccgtgtaatggctgaatgcagcacggcgaaaaagataaccgcacgctggccttcagccgctacgctcatcaactcccgaaggtgtttctgacctcgttcagtgaccgcatcgggaaaatatccctgttcgttctccgctaacgtaaccgatttcacttcaatatagcagtctggacgcgaatccgcctgcaacataaagtcaatacggctgcgttcggcgccgtattttacttcgcttttcagcgagctatagcctgccagctctgaaattgattcattaaggatagcctctttcgtcaacctgttagcccaaagcgtattgacgcaaataattgcgccgctctggctttgagttaattcccaggtgtgtgggtatttccgtttggtgttgtctgaagtcgaataccagacggtatcgccaggcgttgcacaaccggtcatcgcacccgtattcgggcagtgtagcgttaattcgcgaccatcgggtgtgatcacatcggctaaaaaacgtttgtaacgctgaattagcgtcgcgcgctgtagagggggagaaaattccattgcgacaatccttgttattgcgttagcgcccagcgttttagcggcgtgtagcgtgtgcgtccacgggcaaacgaggaggcgtaaagggtgaactccgtcaccgtatacgaccagttaaaacctggcggcgggattgtcaccgcctcgctggcgtcgcgcaataaggtaatatgtggatgaaacggacgattgctttgaaaacaaccgctgcgggcagcctgtgagcggagcatattcgccagctggattaagccgcgaggcggctgtcgcatccctaaccacaccacacgcgaacgcagccattgaccggcgtcatcaagcgtgagtgtgaaaccaggttgacgaatccgtccggctaaaagagaaagcgccttctctttctctgcgctcacttcgcctaaaaatgccagagtcagatgcaaattatcggcggcgaccggacgtcccgcctcaggtgggaagtgtgtggcgcgccagcggataatctgttcgcggatttctgcaggtaagtcgatagcaaagaacagccgttgcggttcagacatgtgaggcactcggttatgaattaccgcgatgctacaatgtggcgcgaagaatgttaaccctctggagcgttttgtgtcgtcgttgcccgttgctgccgtcttacctgagttacttgctgccctcgatggtgcatcgcaggtgttattaagtgcgccgaccggggccgggaaatcaacctggctgccgctgcaactgctggcgcatcccggcattaacgggaaaattatcctgctggagccgcgtcgtctggcggcgcgtaacgttgcgcaacgactggcggagctgcttaacgaaaagccaggcgataccgttggctaccggatgcgtgcgcaaaactgcgtcgggccgaatacccgcctggaagtgattaccgaaggcgtgctgacgcggatgatccagcgtgacccggaactgagtggtgttggattggtgatccttgatgaatttcatgagcgcagcttgcaggcggatttggcattggcgttgttactcgatgtgcaacaaggtctgcgtgatgaccttaaactgctgattatgtcggctacgctggacaacgaccgcttgcagcaaatgctgccagaagcgcccgtcgtcatctcagaagggcgctcgtttccggttgaacgccgttatttgccgctgcccgctcatcagcgttttgacgaagccgtcgcggttgctaccgccgaaatgctgcgtcaggaaagtggatcattactgttatttttacctggcgtcggagaaattcagcgtgtgcaggaacaactgacttcacgcatcggcagtgatgtgttgctctgcccgctgtatggcgcgttgtcgctgaacgatcagcgaaaagcgatcctcccggcaccgcaagggatgcgcaaagtggtgctggcgaccaatattgctgaaacaagtttaaccatcgaaggtattcgtctggtggtggattgtgcccaggaaagggtggcgcgttttgatccgcgtacagggcttacgcggttgattactcaacgcgttagtcaggcgtcgatgacgcaacgtgccgggcgtgccgggcgtctggagccgggtatctgcctgcatttaatcgccaaagaacaagcagaacgcgctgccgcgcaaagtgaaccggagatcttacaaagcgatctttccggtttgctgatggaattactgcaatggggatgcggcgatccggcgcagatgagctggctggatcaaccgccaacggtgaatctactggccgcgaaacgcctgttacagatgctgggggcgctggatggcgaacgcctaagcgcgcaagggcaaaaaatggcagcgctgggtaacgatccgcgtttagcggcaatgctggttagcgcgaagaacgacgacgaagctgctaccgcggcaaaaattgccgccattctcgaagagccgccacggatgggcaatagtgacctgggcgtggcgttttcgcgcaatcaacccgcctggcagcaacgtagtcagcaactgttaaaacgcttaaacgtacgcggcggtgaggcagacagttcgcttatcgcgccgctacttgccagagcgtatgccgatcgcattgctcgtcgccgtgggcaagatgaacgctatcaactggcgaacggcatgggggcgatgctcgatgccgacgatgcgctaagccgccacgaatggttgatcgcaccgttattattgcagggcagcgcctcgccggatgcgcggattttactggcgctgccggtcgatattgatgagttagtacaacgctgcccgcagctggtacagcagtctgacactgtggcgtgggatgacgcgcaaggtacgctgaaagcctggcgtcggctgcaaattggtcagttgatggttaaagtgcaaccgctggcgaaaccctcggaagacgagttgcatcaggcgatgcttaacggcattcgtgataaaggtttaagcgtgctcaactggacggcggaagcggaacagctacgcttgcgtttgttatgcgccgcaaagtggttgccggaatatgactggccagcggttgatgatgaaagtttgttggcgacgctggaaacgtggctactgccgcatatgacaggcgtacattcgctacgcggcctgaaatcactcgatatttatcaggcactgcgtggattacttgattgggtaatgcagcaacgtctggatagtgaattgcctgcgcattacactgtgccgacgggaagccggatcgccattcgttaccatgaagataacccgcccgcgctggcggtgagaatgcaggagatgtttggtgaggccactaatccgactatcgcccaggggcgcgtaccgttggtgctggagttgctttcccctgcccaaaggccgctgcaaatcacgcgtgatttgagcgccttctggaaaggagcgtaccgtgaggtgcaaaaagagatgaaagggcgttatcccaaacatgtctggccggacgacccggcaaacaccgcaccgacgcgacgaacgaaaaagtattcgtgaagaccaaagcaaatttgagagatatcttcttctgtcttgcaacagaagaacagaaaatcgggcttttgcgcctgaatattgcggagaaaaagcatggccgggaatgaccgcgagccaattggacgcaaagggaaaccgacgcgtccggtcaaacaaaaggtaagccgtcgtcgttacgaagatgacgatgattacgacgattatgatgactatgaggatgaagaaccgatgccgcgcaaaggtaagggcaaaggcaaagggcgtaagcctcgtggcaaacgcggctggctatggctgctgctaaaactggctatcgtttttgccgtgctgatcgccatttacggcgtttatctcgatcaaaaaattcgtagccgtattgatggcaaggtctggcaattgcccgcggcagtttatggccgaatggtcaaccttgagccagacatgaccatcagcaagaacgagatggtgaagctgctggaggcgacccagtatcgccaggtgtcgaaaatgacccgtcctggcgagtttaccgtacaggccaacagcattgagatgatccgccgtccgtttgatttcccggacagcaaagaagggcaggtgcgcgcgcgtctgacctttgatggcgatcatctggcgacgatcgtcaatatggagaacaaccgtcagttcggtttcttccgtcttgatccgcgcctgatcaccatgatttcttcgccaaacggtgagcagcgtctgtttgtgccgcgcagtggtttcccggatttgctggtggatactttgctggcgacagaagaccgtcatttctacgagcatgatgggatcagtctctactcaatcggacgtgcggtgctggcaaacctgactgccggacgcacggtgcagggggcgagtacgctgacgcaacagttggttaaaaacctgttcctctccagcgagcgttcttactggcgtaaagcgaacgaagcctacatggcgctgatcatggacgcgcgttacagcaaagaccgtattcttgagctgtatatgaacgaggtgtatctcggtcagagcggcgacaacgaaatccgcggcttcccgctggcgagcttgtattactttggtcgcccggtagaagaattgagcctcgatcagcaggcgctgttggtgggtatggtgaaaggggcgtccatctacaacccgtggcgtaacccgaaactggcgctggagcgacgtaacctggtactacgtttgctgcaacagcaacaaattattgatcaagaactctacgacatgctgagtgcgcgtccgctgggtgttcagccgcgcggtggggtgatctctcctcagccagcctttatgcagctggtgcgtcaggagctgcaggcgaaattaggcgataaggtaaaagatctctccggcgtgaagatcttcactacctttgactcggtggcccaggacgcggcagaaaaagccgccgtggaaggcattccggcactgaagaaacagcgtaagttgagcgatcttgaaaccgcgattgtggttgttgaccgctttagcggtgaagttcgtgcgatggtcggtggttctgagccgcagtttgcgggctacaaccgtgcgatgcaggcgcgtcgttcgattggttcccttgcaaaaccagcgacttatctaacggccttaagccagccgaaaatctatcgtttgaatacgtggattgccgatgcgccaatcgcgctgcgtcagccgaatggccaggtctggtcaccgcagaacgatgatcgtcgttatagcgaaagtggcagggtgatgctggtagatgcgttgacccgttcgatgaacgtgccgacggtgaatctgggcatggcgttggggctgcctgcggttacggagacctggattaaactgggtgtgccgaaagatcaactgaatccagttccagcaatgttgttgggggcgttgaacttaacgccaatcgaagtggcgcaggccttccagactatcgccagcggtggtaatcgtgctccgctttccgcgctacgttcagtcatcgcagaagacggcaaggtgttgtatcagagcttcccgcaggcggaacgcgctgttccggcgcaggcggcgtatctgacactatggaccatgcagcaggttgtacaacgcggtacgggacgtcagcttggggcgaaatacccgaacctgcatctggcagggaaaacagggactaccaacaataacgtagatacctggtttgcgggcattgatgggagcacggtgaccatcacctgggtcggccgtgataacaaccagccgaccaaactgtatggtgccagcggggcaatgtcgatttatcagcgttatctggctaaccagacgccaacgccgctgaatcttgttccgccagaagatattgcagatatgggcgtggactacgacggcaactttgtttgcagcggtggtatgcgtgtcttgccggtctggaccagcgatccgcaatcgctgtgccagcagagtgagatgcagcagcaaccgtcaggcaatccgtttgatcagtcttctcagccgcagcaacagccgcaacagcaacctgctcagcaagagcagaaagacagcgacggtgtagccggttggattaaagatatgtttgggagtaattaacgtctaagcgtgatataccggatggcgagctgccatccggtaaaataacatcccctccaaagtattaaccctttcttttcatctgattgtttattgacccttcaggaatgcgcagattgcgtaccgcttgcgaacccgccagcgtttcgaatattatctcatctttataataatcattctcgtttacgttatcattcactttacaccagagaaataccaatggcaccttccaaaactgctcagccaaaacactcactgcgtaaaatcgcagttgtagtagccacagcggttagcggcatgtctgtttatgcacaggcagcggttgaaccgaaagaagacactatcaccgttaccgctgcacctgcgccgcaagaaagcgcatgggggccggctgcaactattgcggcgcgacagtcagctaccggcactaaaaccgatacgccgattcaaaaagtacctcaatctatttctgtcgtcaccgctgaagagatggcgctgcatcagcctaagtcggtgaaagaagcgcttagctatacccctggcgttgctgtgggaacccgtggcgcatctaatacttatgattacctgatcatccgcggatttgcggcagacggccaaagccagaataactatctgaatggcctgaagttgcagggcaacttctataacgatgcggtcatcgacccgtatatgctggaacgtgctgaaattatgcgtggcccggtttccgtgctttacggtaaaagcagtcctggcggtctgttgaatatggtcagcaagcgtccgaccactgaaccgttgaaagaagttcagtttaaggccgggactgacagcctgttccagaccggttttgacttcagcgatgcactggatgatgacggcgtttattcttatcgcctgaccggtcttgcgcgttctgccaatgcccagcagaaagggtcagaagagcagcgttatgctattgcaccggcgttcacctggcgtccggacgataaaaccaatttcaccttcctttcttacttccagaacgagccggaaactggttattacggctggctgccgaaagaggggaccgttgagccgctgccaaacggtaagcgtctgccgacagactttaacgaaggggcgaagaacaacacctattctcgtaacgagaagatgattggttatagcttcgaccacgaatttaacgacacctttactgtgcgtcagaacctgcgctttgcgcaaaataaagtttcgcaaaagagcgtatatggctacggtatgtgttcagatccgctgtataccaaagaccaggaggcactcaaggcgagtccatgtttaagtatcccgcagtctcaatggggccatacactgactcgtcagtacgttatcgataatgagaagttagaaaacttctctgttgatactcagttgcaaagcaaattcgcaaccggttctgtggatcacactctgctgactggcgttgactttatgcgtatgcgtaatgacatcgactcctggttcggatatgccggttcagttgcaccatctgatatctataatttagaccgtagtgactttgattttggcgctcacccgaatccgtctggtccataccgcgttctgctgaaacagaaacaaaccggcctgtatgttcaggatcaggcgcagtgggataaagtgctggttacgcttggcggtcgctatgactgggccgatcagtcatctttcaaccgtgattacggtaataaatctgaacgtgacgacaaagagttcacctggcgtggtggtgtaaactacctgttcgacaacggcgtaacgccttacttcagctacagtgaatcatttgaacccgcttcacagactgatgcgaacggtgatctgtttgcaccttcgaaaggcaaacagtatgaagtcggcgtgaaatatgtgccagaagatcgcccaattgtggtgactggcgcactgtatcagcttaccaaaactaataacctgatggcggatccgaacggttcactgttctcggttgaaggcggtgagattcgtgcgcgtggcgtagagctggaagcgaaagcggcactgtcggcgagtgttaacgtagtcggttcttatacttacaccgatgcggaatacactaccgatactacctacaaaggcaatacgcctgcacaggtgccaaaacacatggcttcgctgtgggctgactataccttctttgacggtccgctttcaggtctgacgctgggcaccggtggtcgttatactggctccagctatggtgatccggctaactcctttaaagtgggaagttatacggtcgtggatgcgttagtgcgttatgatctggcgcgagtcggcatggcgggctccaacgtggcgctgcatgtcaacaacctgtttgatcgtgaatacgtcgccagctgctttaacacttatggttgcttctggggcgcagaacgtcaggtcgttgcaaccgcaaccttccgtttctaatttctcttttggggcacggatttccgtgcccgtttcacaagttggctgttatgcaggaatacacgaatcattccgataccacttttgcactgcgtaatatctcctttcgtgtgcccgggcgcacgcttttgcatccgttgtcgttaacctttcctgccgggaaagtgactggtctgattggtcacaacggttctggcaaatccactctgctcaaaatgcttggtcgtcaccagccaccgtcggaaggggagattcttcttgatgcccaaccgctggaaagctggagcagcaaagcgtttgcccgcaaagtggcttatttaccgcagcagcttcctccggcagaagggatgaccgtgcgtgaactggtggcgattggtcgttacccgtggcatggcgcgctggggcgctttggtgcggcagatcgcgaaaaggtcgaggaagctatctcgctggttggcttaaaaccgctggcgcatcggctggtcgatagcctctctggcggcgaacgtcagcgggcgtggatcgccatgctggtggcgcaggatagccgctgtctgttgctcgacgaaccgacttcggcgctggatatcgcccaccaggttgatgtactggcgctggtgcatcgtttaagtcaggagcgaggcctgacggtcattgccgtgctgcacgatatcaatatggcggcgcgctactgtgattatctggtcgccctgcgcggcggtgaaatgattgctcagggaacgcctgcggaaattatgcgcggcgaaaccctcgaaatgatttatggcatcccgatgggtattctgccgcatccggcgggtgctgcacctgtgagttttgtttattgatgagcggcttacctcttatttcgcgccgccgactgttaacggcgatggcgctttctccgttgttatggcagatgaataccgcccacgcggcagttattgatcccaatcgtattgtggcactggagtggttgccggtggagttactgctggcgctcggcatcgtgccttacggcgtggcggacaccatcaactatcgcctgtgggtcagcgaaccgccattgccggactcagtgattgacgttggtttgcgtacagaacccaaccttgaactgctgaccgaaatgaaaccgtcgtttatggtctggtctgcaggatatggcccttcaccagaaatgctggcacgtattgcgccggggcgcggatttaacttcagcgacggcaaacagccactggcgatggcgcgtaaatcactgacggaaatggcagatttacttaacctgcaaagcgcagcggaaacgcatttagcgcactatgaagactttatccgcagcatgaaaccccgctttgtgaagcgtggtgcacgcccgttattgctgacgacgcttatcgatccgcgccatatgttggtcttcggtccaaacagcttgttccaggaaattctcgatgagtacggcatcccaaatgcctggcaaggggaaaccaacttctggggcagtaccgccgtcagtatcgatcgtctggcagcgtataaagacgttgatgtgctctgttttgatcacgacaacagcaaagacatggatgcgctaatggcaaccccgctgtggcaggccatgccgtttgtctgcgccggacgctttcagcgcgtacctgcagtctggttctatggtgcgacgctttctgcaatgcactttgtgcgtattctggataacgccatcggaggtaaagcgtgagtaaacgaattgcgctttttccggtgttattgctggcgctgctggtggttgctgctgcggcgttgacctggatgaacttctcgcaggcgctgccgcgcagccagtgggcgcaggccgcctggtcgccggatattgacgtcatcgagcagatgatttttcactacagcttgttgccgcgtctggcgatttcgctgctggtgggcgcgggcctggggctggtgggcgtgctgtttcagcaagtgctgcgtaacccgctggcggaaccgacgacattgggtgttgcaacaggcgcgcaactggggattaccgtcaccacgctctgggcaatccccggcgcgatggcgagccagtttgctgcgctggcaggggcttgtgttgttggcttaatcgtctttggcgtcgcgtgggggaaacgtctttcgccggtaacgctgatcctcgcggggctggtagtgagcctttattgcggtgcaatcaatcagttactggttatcttccatcatgaccaactgcaaagcatgttcctgtggagcaccggaacgctgacgcaaaccgactggggcggcgttgagcgtttatggccgcagctgctgggcggcgtgatgctgacgttattgctacttcgcccgttaactctgatggggcttgatgatggcgtggcgcgcaatctcgggctggccttgtcgctcgctcgtctggcggcgttgtcgctggcgattgtcatcagtgcgctgctggtgaacgcggtggggattatcggctttatcggtttgttcgcgccactgctggcgaaaatgctgggggcgcggcgtttgttgccacggttgatgctggcatcgctgattggtgcgttaattctgtggctttctgatcaaatcatcctctggctgactcgcgtgtggatggaagtgtctaccggttcggtcactgcgttgatcggtgcgccgctgctactgtggctgctgccgcgtttacgcagcattagcgcgccggatatgaaggtcaacgatcgtgtcgcgactgaacgccaacacgtgctggcgtttgccctcgcgggcggcgtgctgctgttgatggctgtggtggtggcgctgtcgtttggtcgtgatgcgcacggctggacgtgggcgagcggggcgttgctcgaggatttgatgccctggcgctggccgcgaattatggctgcgctgtttgcgggcgtcatgctggcggtggcgggctgtattattcagcggctgacaggaaacccgatggcaagcccggaagtgctggggattagctccggcgcggcgtttggcgtggtgttaatgctgtttctggtgccgggtaatgcctttggctggctgttacccgcaggcagtctcggggcggcggtgacgctgttgatcattatgatcgccgccggacgcggtggattttccccacaccgcatgttactggcggggatggcgttaagtaccgcgttcaccatgcttttgatgatgttgcaggcaagtggtgacccgcgaatggcgcaagttctgacctggatttccggttcgacctacaacgcgaccgatgcgcaggtctggcgtaccggaattgtgatggtgattttgctggcgattaccccgctgtgccgccgctggctgaccattttaccgctgggtggtgataccgcacgagccgtggggatggcgctgacgccgacgcgaattgcgctgctgctgttagcggcttgcctgacggcgaccgcgacaatgaccattggaccgttgagttttgttggtttaatggcaccgcatattgcgcggatgatgggctttcgacggacgatgccacacatcgtaatttcggcgctggtgggtggtttactgctggtgttcgctgactggtgtgggcggatggtgctgtttccattccagatccccgcggggctactgtcgacctttatcggcgcgccatattttatctatttgttgagaaagcagagccgttaattgaatgcctcgcccggtgggcgaggcaaaatcatcacaacttcgcaaacacccgacgtgcagcatcgatggtgttattgatatcttccatgctatgcgccacggacataaagcccgcttcaaacgctgacggtgccaggtaaacaccttcgtccagcatcatatggaagaaacgcttaaagcgttccacgtcacaggccatcacatcctgatagcacgtcacggactcggcgtcggtaaagaaaataccgaacatgccgccaacgtggtttaccaccagcggaattccggcttcttctgccgcttcccgcagaccttctgccagacgtgttgtcagctcatccagcgtctcgtgaacgcccggctgtgcgacttcattcagacaggcgaaaccagcagccatcgcaatcgggttaccggaaagcgtacccgcctgatagaccggaccggtcggggccagcgcatccattacatcacgacgaccaccgaatgcgcctaccggcattccaccgccgatgattttgccgaggcaggtgagatccggttccacaccgtaataatcctgtgcgccagctagcgctacgcggaaaccggtcatcacttcatcgatgatcagcaacgcgccaaattcgtcgcacagcgcgcgcagacctggcaggaactctggcagcggtggaacgcagttcatattgcctgccaccggctcgacgataatacaggcaatctcttgcgggtattgctcaaacgcggcgcgtacagaggccagatcgttataagtacaggttaaggtatgtttggcgaaatctgccggaacgcccggcgaatttggctggcctaacgtgagtgcgccagaaccggctttcaccagcaggcagtcagcgtgaccgtggtaacaaccttcaaatttaataattttgtcgcgaccggtaaaaccacgggccaggcggatggcgctcatcgtcgcttcagtgccggagttcaccatgcgcaccatatccatggtcgggaccagttcggtcaccagttgcgccattttcacttccatttcggttggtgcaccaaagcttaaaccacgctcggcggcttcaatcacggcattgcggatcgccggatggttatggcccagcaccatcggcccccaggaaccgacataatcgatataggctttgccatcaacatcgtacagataagcgccgtccgctttttcgataaacagtggagtgccgcccacgccagtaaaggcgcgaacaggggagttcacaccgccagggatcagctcgcgcgctgcgctgtaaagattttcagacttactcatggagggttcctgattcgtagaaaaagtgaatggctgctattctatgttattcataacaagttaaatactcgtcaaacatcaggctgcttgtactggtgcaatcctgatttcttagagtataaaagttttgtgcatttgaaacattacgctttgcaaaggattttcatggaacgtgcgagtaaaatgccgtcatcttatttgtatgaccaataagtgatcattggatgaaaactgatactccctctttagaaacaccgcaggccgcgcgcctgcgacgcagacaactgattcgccaacttcttgagcgcgataaaaccccgttagccattttgtttatggcggcagtcgtcggcacgcttgtcgggctagctgcggttgcttttgacaaaggtgtcgcctggttgcagaaccaacgtatgggggcactggtacatactgctgataattatccgcttctgttaaccgtcgcttttctctgttcggcggtgctggcgatgttcggctactttttggtgcgcaaatacgcgccggaagcaggtggttcggggatcccggaaattgaaggggcgctggaagatcaacgtcccgttcgctggtggcgtgtgttgccggtgaaattctttggcgggctgggaacactcggcggaggcatggtgttggggcgcgaagggccaaccgtgcagataggcggcaatatcgggcggatggtacttgatgttttccgcctgaaaggtgacgaagctcgtcatacgctgttggcaaccggtgctgctgcggggctggctgcggcctttaacgcgccgctggcgggtattttgtttattatcgaagagatgcgtccgcagtttcgctatacgttaatttcgattaaagcggtatttattggcgtcattatgtcgaccattatgtaccggatttttaatcatgaagttgcgttgattgacgtcggtaaactttctgatgcgccgcttaatacgctgtggctttatctgatcctcggtattatttttggcattttcggccctatttttaataaatgggtgctggggatgcaggatttgctgcaccgtgtgcacggtggcaatattaccaaatgggtactgatgggcggtgcgattggcggtctgtgtggattgctggggtttgtggcaccagcaacttcgggcggcggttttaacctgattcctatcgctaccgcggggaatttcagcatgggaatgctggtgtttatcttcgtcgcgcgggtcattaccactttactctgcttctcttccggcgcgccgggcggtatttttgccccgatgctggcgctgggtactgtgctgggaaccgctttcggaatggttgccgttgagttgtttccgcaatatcaccttgaggcggggacgtttgctattgccggaatgggggcgttactggcggcatctattcgcgcgccgttaacggggatcattctggttctggaaatgaccgataactaccagctcattttgccaatgattattaccggtcttggcgcaacactattagcacaatttaccggtgggaaaccgctatactcggcgattcttgcgcgcacgctggcaaaacaggaagctgagcaactggcgcgaagcaaggccgcatcagcccgcgagaatacttgaacgaaataccagggtattagataatggcgattattattgggttagaatttgcccaattgccgatgtcgtttggagcaaaatatgagtgatgacgtagcactgccgctggagtttaccgacgcagcagccaacaaagttaaaagcctgatcgctgacgaagataacccgaatctgaaattacgcgtgtatatcaccggtggcggttgcagcggcttccagtatggtttcacctttgatgatcaggtgaacgaaggcgatatgaccatcgaaaaacagggcgttggcctggtggttgatccgatgagcctgcaatatctggtcggcggttccgttgactataccgaaggtctggaaggttctcgtttcatcgtgaccaacccgaacgcgaaaagcacctgtggttgcggttcttccttcagcatataatctgttgttcatgtgccggataaactatccggcacatcttctctcttcaacgcccattctcatccagcgcaaacgtcggtagcttaagatgccaacgaatagccgccagccgaatcaatagcgtcacgaccatgcccatcatactggctgtttccagtggtacggaaaatgtgtaataagccgtagcgtggacaataccgccgataatacaggcagttgcgtagatttctgtacgtaaaatcatggggatttcgcgggccagtacatcacgaatgatcccgccgccaacgccagtaatgacgcccatacaaaccgcgattaacggaccggcttccgcattaaaggctttattcacgccaatgccgacaaacaccgccagaccaacggcgtccagcaccggcaacatccattttggtaagcgtcttggctggcgcaccagcacgatggtcagcatgctggtgaccattgcaacgaccagatcggtgggatctttcacccaaaataccgggccgtgatccagcgccatgtcgcgaattgttccgccgcctactgcggttaccacgcccagtaccagaacaccaaaagggtccatacgcaattttccggctaacaaaacgccggagatggcaaataccgctgtgccgactatatccagccaatagacgagcattgttcaatccccactgagcacctgaaaaggtcaggcgctaatctacctgtgaaagcgcattacagagctgttgtgcagcgaggataatacgtgggcttgcacgttcaaaccagtcactcgtgagaggaataacgggaattttgagctgttcaccccagtattgtttgattttaggaatttggtccggtccgcctgtaatgacaatcgcctgtggcgagcgtgctaacacctgttcgcggctaacttgcggccagggaacccggctgtctttaaagatgttttctccgccacaaacttcgagtacctggttctgaatcgactcttttccactggtaaatggcggattaatgccgaattgcagaaaaacacgttttttaggtttatcagcatattgcgctttcaattgcgcgtactgatccagcagggattgcgcggcttgttcggccttatccggttgcggactccagggggccagttgacgtaacgcattggcaatttgttcaatgcttgtcgcatcgacccacatcacttttattcccagcgaagccagctggtcaacctgccgctcggcattacctccacgccaggcaatcaccagatcgggtttcagcgcgacaatgcgttccagattcatcccctgccaggtggaaacctgctcaatcttttgcgcttgtagaggatagtcggaatagctgctgaccccaaccggcgtgatcccggcggcaaaggcaagttcagtgttggcgggagaaagcgtgatgacgcgcggcgcggcattgagccacagcggcgcgagaaaagacagggcgaccagcgccctgaacagtgacttagccatgtgccagtttctgcaccagtgactcaaccatcaggctggactgtttagcggcaacagccaggaactcatcgaagctaagatgagactgttgatcggccacgtcggagatggcgcgtacgacgacaaacgggacgttgaaattgtggcagacatgggcgattgccgtcgcttccatctctacagcaatggcctgtgggaagttgtggcggattttcgccagaccaacagaaccgttgatgaaagcgtcgccgctaacaatcaggccacgtacagcgttaagattcagttcggcaatgcaggcctcagcggcagcgatcagtttatcgtcagctttgaagcctgccgggcagcctggtaactgaccgtattcataaccaaatgccgtgacatccgcgtcgtgataacgcgcttcgtccgagacaacgatatcgcccactttcagcgttggtgccaggccaccggcagaaccggtgttaataatcacatctggcttgcagtgttccaacagcaaagtggcacccagcgccgcagcgactttaccgatgcccgatttcagaagcgcaacctcggttccattcagttggccggtatagatttcgcaaccgcccagactgatagtttgacggttttcgattttgtcacgcagcagcgtaacttcttcttccattgcaccaatgatgccgattttcatagatttactcgcgataagcccgatttgaaggcatagtttaccatgcgcttacggggaagcgtatttctcacgcgggagaggacatggcacagattgatttccgaaaaaaaataaactggcatcgtcgttaccgttcaccgcagggcgttaaaaccgaacatgagattctgcggatcttcgagagcgatcgcgggcgtatcatcaactctccggcaattcgtcgtctgcaacaaaagacccaggtttttccactggagcgcaatgccgccgtgcgcacgcgtcttacccactcgatggaagtccagcaggtggggcgctacatcgccaaagaaattttaagccgtctgaaagagcttaaattactggaggcgtatggtctcgatgaactgaccgggccctttgaaagcattgttgagatgtcatgcctgatgcacgatatcggcaatccgccgtttggtcattttggcgaagcggcgataaatgactggtttcgccagcgtttgtacccggaagatgccgaaagccagcctctgactgacgatcgctgcagcgtggcggcactacgtttacgggacggggaagaaccgcttaacgcgctgcggcgcaagattcgtcaggacttatgtcattttgaaggtaacgcacagggtattcgtttggtgcatacattgatgcggatgaatctcacctgggcacaggttggcggtattttaaaatatacccgtccggcgtggtggcgtggcgaaacgcctgagacacatcactatttaatgaaaaagccgggttattatctttctgaagaagcctatattgcccggttgcgtaaagaacttaatttggcgctttacagtcgttttccgttaacgtggattatggaagctgccgacgacatctcctattgtgtggcagaccttgaagatgcggtagagaaaaggatatttaccgttgagcagctttatcatcatttgcacgaggcgtggggccagcatgagaaaggttcgctcttttcgctggtggttgaaaatgcctgggaaaaatcacgctcaaatagtttaagccgcagtacggaagatcagttttttatgtatttacgggtaaacaccctaaataaactggtaccctacgcggcacaacgatttattgataatctgcctgcgattttcgccggaacgtttaatcatgcattattggaagatgccagcgaatgcagcgatcttcttaagctatataaaaatgtcgctgtaaaacatgtgtttagccatccagatgtcgagcagcttgaattgcagggctatcgggtcattagcggattattagagatttatcgtcctttattaaacctgccgttatcagactttactgaactggtagaaaaagaacgggtgaaacgtttccctattgaaacgcgcttattccacaaactctcgacgcgccatcggctggcctatgtcgaggctgtcagtaaattaccgtcagattctcctgagtttccgctatgggaatattattaccgttgccgcctgctgcaggattatatcagcggtatgaccgacctctatgcgtgggatgaataccgacgtctgatggccgtagaacaataaccaggcttttgtaaagacgaacaataaatttttaccttttgcagaaactttagttcggaacttcgcgctataaaacgaatctgaagaacacagcaattttgcgttatctgttaatcgagactgaaatacatgaaaaaaaccacattagcactgagtgcactggctctgagtttaggtttggcgttatctccgctctctgcaacggcggctgagacttcttcagcaacgacagcccagcagatgccaagccttgcaccgatgctcgaaaaggtgatgccttcagtggtcagcattaacgtagaaggtagcacaaccgttaatacgccgcgtatgccgcgtaatttccagcagttcttcggtgatgattctccgttctgccaggagggttctccgttccagagctctccgttctgccaggggggcctgggcggtaatggcggcggccagcaacagaaattcatggcgctgggttccggcgttatcattgatgccgataaaggctatgtcgtcaccaacaaccacgttgttgataacgcgacggtgattaaagtccaactgagcgatggtcgtaagttcgacgcgaagatggttggcaaagatccgcgctctgatatcgcgctgatccagatccagaacccgaaaaacctgaccgcaattaagatggcggattctgatgcgctgcgcgtgggtgattacaccgtagcaattggtaacccgttcggcctgggcgagacagtaacttccgggattgtctctgcgctgggacgtagcggcctgaacgctgaaaactacgaaaacttcatccagaccgatgcagcgatcaaccggggtaactcaggtggtgcgttggttaacctgaacggcgaactgatcggtatcaacaccgcgatcctcgcaccggacggcggaaacatcggtatcggttttgctatcccgagcaacatggtgaaaaacctgacctcgcagatggtggaatacggccaggtgaaacgtggtgagttgggtattatgggcactgagctgaactccgatctggcgaaagcgatgaaagttgacgcccagcgcggtgctttcgtaagccaggttctgccgaattcttccgccgcgaaagcgggcattaaagcgggtgatgtgatcacctcactgaacggtaagccaatcagcagctttgccgcactgcgtgctcaggtgggcactatgccggtaggtagcaaactgaccctgggcttactgcgcgacgggaagcaggttaacgtgaacctggaacttcagcagagcagccagaatcaggttgattccagcaccatcttcaacggcattgaaggcgctgagatgagcaacaaaggtaaagatcagggcgtggtggtgaacaacgtgaaaacgggcactccggctgcgcagatcggcctgaagaaaggtgatgtgattattggcgcgaaccagcaggcagtgaaaaacatcgctgaactgcgtaaagttctcgacagcaaaccgtctgtgctggcactgaacattcagcgcggcgacagcaccatctacctgttaatgcagtaatttccctcaaccccttcctgaaaacgggaaggggttctccttttacaatctgtgaacttcaccacaactccatacatcttcatcatcctttgggcatttgcacaatgccgtacgttacgtacttccttatgctaagccgtgcataatggaggacttatggctggctggcatcttgataccaaaatggcgcaggatatcgtggcacgtaccatgcgcatcatcgataccaatatcaacgtaatggatgcccgcgggcgaattatcggcagcggcgatcgtgagcgtattggtgaattgcacgaaggagcattgctggtactttcacaaggacgagtcgtcgatatcgatgacgcggtggcacgtcatctgcacggtgtgcggcaggggattaatctaccgttacggctggaaggtgaaattgtcggcgtaattggcctgacaggtgaaccagagaatctgcgtaaatatggcgaactggtctgcatgacggctgaaatgatgctggaacagtcgcggttgatgcacctgttggcgcaggatagccgtttgcgggaagaactggtgatgaacctcattcaggctgaggagaatactcccgcacttactgaatgggcgcaacggctggggatcgatctcaatcaaccgcgagtggtggctattgttgaggtcgacagcggtcagcttggtgtggacagcgcaatggcggagttacagcaactgcaaaatgcgctgactacgcccgagcgtaataatctggtggcgattgtctcgctaaccgaaatggtggtgttgaaaccggcgttgaactcttttgggcgctgggacgcagaagatcatcgtaagcgagttgaacaactgattacccgcatgaaagagtatggccagctgcgttttcgcgtttcgctgggcaactattttaccggtcctggcagtattgcccgatcctatcgtacggcgaaaacgacgatgatggtgggtaaacagcggatgccagaaagtcgctgctatttttatcaggatctgatgttacctgtgttactcgacagtttgcgtggcgactggcaggccaacgaactggcgcgaccgctggcacggctgaaagcgatggacaataacggcttgctgcggcgaacgctggcggcgtggtttcgccacaatgtgcaaccgctggcaacgtcaaaggcgttgtttattcatcgtaatactctggaatatcggcttaatcgtatatcggaactgaccgggcttgatttgggcaattttgatgacaggttgctgctgtatgtggcgttacaactggatgaagagcggtaggtcgattacaaaattacagccgggtgagactttacccggccacagaatggcattatttacgcgtcagtttttccagatcggcttcaatctcgctgatcttattggttactactgactccaggtgacgtaagtcgtcgaggatcttacgcttaagatcaacttcgctgcggtcacgctggcagatttgatcaagctcatcaatgatataccgtagattcgggctaatttcctggacttctttataaccctgacccacaccatcagcgacgaccgttttacgctgacgcgggtatttaaacttcacgctcttggcgaaaaactcgcctttgtctttctggaaatagattttcagaatatcgttgttggcttcctgccggaggctgtaacgatcaatttcttcaggattggtaatacccagacttttcagattgtcgtacatagcgttacctcaaaatgagtcagtaaattgtgcttattttagcatttggcctggcccgcccggctcgactgtgatcgcagaaagcctttttcttccagacttctatcatggcgtaaaaatcaaaaaattacctgctttattgtggtgatattctatgggatggattagcacatttatcttcattttgcgaattacatgacagtccgaaacaagatgaaaaagtatttaaaaaaaagggggaaaatgagtaggacgaattattctgagccagaaagcaatcgggcagcgtcgtgctgcccgtgtacatacttttagtcgatggtacgcagcagttcgttaataccaactttgccgcgagttttcgcgtcaactttcttaacgataactgcacagtagaggctgtatttgccatctttcgacggcagattacctgaaacaaccacagaccctgccggaacgcgaccgtagtggatttcgccggtttcacggtcataaatacgggtgctctgaccaatgtatacgcccatagagatgacggaaccttcttcgacaatcaccccttcaaccacttcagagcgtgcgccgatgaagcagttatcttcaataatggtcgggttagcctgcagcggctccagcacgccgccgatacccacgccaccggaaaggtggacgtttttaccaatctgcgcacaggaaccgacggtcgcccaggtatcaaccatggtgccttcatcaacatatgcgccgatgttgacgtaagacggcatcagcacggtgttacgggcaatgaacgcgccctgacgcactgccgctggtggcacgacgcggaagccttctttctggaaaagtgcttcatcgtagttagcgaatttcatcggcactttgtcgaagtagcggctttctgccccttcgatcacctgattatcattaatacggaaagagagcagcaccgcttttttcaaccactgatgcgtcacccactgaccgtcaattttttccgctacacgcagtgcgccggaatccagcagggcgatcacctgatttaccgcttcgcgggtaacggtgtctgcattggctggcgtgatctcggcacggcgttcaaaagcggtttcaataatgttctgtaactgctgcattgttaaactcttttcatatcagtaaacacatcaccctttatcgtttggattgagggcctctgtcaaccgctgatgcacttcctgctgcaactcgttattaagcgcacgccggtcagcggtggcaattatgaataaatcttctactcgctcgccaatggttgtaattcgggcgccatgaagcgaaattcccagatcggcaaaaattttcccgactcgcgccagcagtccaggttggtcgagggcgatcagttcgaggaacgatttgcggtcggtatgggtcggcaaaaacgtcacttcggtttcaacagtaaaatggcgcaatttagcgggttggcgacggggctgcggtggctgccagctactttgtgtcagtacttgctccagaccaaaccgaataacctcatgacgatctgcggatagcgggctaccatcgggttccagcactataaaggtatccatcgccataccgtcgcgagtggtgaaaatttgtgcgtcgtgaacacttaaattgcggcggtctaattcggcacagacggcggcaaacagataggggcggtccgggctccagataaaaatctcggtgcctccacgcgtagcctgcgggctaagcagtaccagcggtttgcctaaatcatgctgtaataaatggcgtgcgtgccaggccagttgatttgggctatggcggacaaaatagttagcgcgacagcgtgaccaaatttggtgcagcgcctcttcgtcgatgttatccatgcgcagtagtgccagcgcctggagttggtgatggcgaacccgttcgcgcatatccggcgtgttttgcattccgcgtcgtagctgcttttcggtggcaaaatagagttcgcgcaacagactttgcttccagctattccacagtgtttcgttggtggcgcaaatgtcagccactgtcaggcataccagatagcgcagacgattttccgtttgaacttcttcggcaaactgcttgatgacttccgggtcctgaatatcgcggcgctgagcggtcaccgacatcagcaagtgctggcgaaccagccaggcgaccagctgtgtttcgcgtgagttcagcccgtggagttcggcaaaatgcactacatcctgagcaccgagaatggagtggtcgccgccgcgtcctttggcgatatcgtgaaacagcgcggcgatgaaaatcagctcagttgacggcaggcgcggccagacgtccacacacaacggatggcgctggcgcgtttcttcactggcaaaactctccagtttcagcatcacgcggatagtatgttcatccaccgtgtaggcatggaacaggtcaaactgcatctgcccgacgatatgcgaccattgcggcatatacgcgccgagcacgctatggcgatgcattggcaatagcccgcgccgcaccgctccggggtgacgcagaatgctcaaaaacagttttcgcgcttccggaatattacacagaggttgttgcagatggcgacgggcgtggcgtaactggcgtagcgtggtggagtaaatgccggtgatcgcgctgttgcgcaccatggtgtagaacatacgcaagatggcttccggctggcgcataaatagtgtttcatcacgcaggtcgatcagcgttccgcgtagctgaaactcatcgtcgattggacgtggtttttcgtcggcgggaagggcgaggatggcttcatcgaacagttgcagcagcatctggttgagttcactgacgcggcgtgtaacgcggaagtaatccttcatcatccgctcgaccggttcgttaccttcaccactgtaattcaaacgctgggcgacgctaagctggcgatcgaataacaggcgattatcgtaacgactgacgaccagatgcagggcaaagcgaatgcgccacaatatatgcaggcattcgtttaattccgctcgctccgcagaggttaagaagccaaaccctaccatttcatccagcgatgttgcgccaaaatgacggcgggccacccattgcagagtgtggatatcgcgcaagccgccggggctacttttgatgtctggttcaaggttgtagctggtgccgtggtaacgctgatggcgctggttctgttcttcaactttcgccgcgtagaacttgtcggaaggccagaatccttcgctaaaaatatgtttttgcagttcgaggaacagtgcaacatcgccaattaataagcgggattcgattaaattagtggcgacggttaaatccgataacccttccagcatgcactcttcaagcgtgcgcacgctatgacccacttccagctttacatcccagagcagcgttaacagctcgcccactttttgcgcctgatcgtccgggagctttttacggcttaaaatcagtaaatcgatgtcagaaagtggatgcagctcgccacgaccgtagccaccgacggcgaccaatgccaggtcggcaatctggctgaatcccgcttcaatccataatcgttgaagaagctggtcgataaactcggtacgcgcctcaatcaactgttctgcggagataccattgtcaaaggcatcacccagccaacgctggaaagtatcgatatgggcttttatcccaccgacggttaattcatcacggggccaggcgcatggattttgcggttgaccgtgcagggtggggagagcggtgtttgcgtactgttctggaagggtattcattgtgcgccacccataagattaaattattgcattaaaaaagccggcattcgccggcttcattttattcgtcgtgcgagattatcgccgggatggtgtcatccttgcgtagcgtcagaatttcgcagccgttatcagtcaccacaatagtatgctcatattgtgcagacaagctgcgatctttggtttttaccgtccagccatctttcatggtgcggatctcttttttacccgcgttgaccattggctcgatggtgaacgtcatccccggtttcagcacgacgttggtttcacgggagtcatagtgcagcacctgcggttcttcgtggaagccgcgaccaataccgtgtccacaatattcacgaacgacggagaagccttctgcttcgacaaatttctgaattgccgcaccgatttcgcgcagattaatgccaggttttaccatgcgtagcgccaggtacaggctttcttgcgtgatgcggcacagacgttcgcccatgatggtcggcttaccgacgataaacattttcgaggtatcgccgtggaaaccatctttgattacggtgacatcaatgttaacgatatcgccatctttcagcagcttggcgtcgtccgggataccgtggcacaccacttcattaatagagatgcaaacggatttcggatagccgtgatagccgaggcaggcagaaaccgcgtgttgttcattaacaatgtaatcattacagatgcgatccaactcgccggtgctgacgcccggtttaacatatggttcgatcatctccagcacttcggcagccagtcggccagcgacgcgcattttttcgatatcttctggggtcttgattgagatagccattaattctgtccatcagcgtcggtgataccgacaatatatatgtaagtgccgtcaatggtatcacacccgggcaaattgagaatcattctgaatttcgccaaacgtgccactgaaggttttctataatagaaaattcaacgtctgatgctgtacacagcgccaacaattattggtgtccacgacgtatttgtggtataaagcgcgccggacttccgatccatttcgtatacacagactggacggaagcgacaatctcactttgtgtaacaacacacacgtatcggcacatattccggggtgccctttggggtcggtaatatgggatacgtggaggcataaccccaacttttatatagaggttttaatcatggcaactgtttccatgcgcgacatgctcaaggctggtgttcacttcggtcaccagacccgttactggaacccgaaaatgaagccgttcatcttcggtgcgcgtaacaaagttcacatcatcaaccttgagaaaactgtaccgatgttcaacgaagctctggctgaactgaacaagattgcttctcgcaaaggtaaaatccttttcgttggtactaaacgcgctgcaagcgaagcggtgaaagacgctgctctgagctgcgaccagttcttcgtgaaccatcgctggctgggcggtatgctgactaactggaaaaccgttcgtcagtccatcaaacgtctgaaagacctggaaactcagtctcaggacggtactttcgacaagctgaccaagaaagaagcgctgatgcgcactcgtgagctggagaaactggaaaacagcctgggcggtatcaaagacatgggcggtctgccggacgctctgtttgtaatcgatgctgaccacgaacacattgctatcaaagaagcaaacaacctgggtattccagtatttgctatcgttgataccaactctgatccggacggtgttgacttcgttatcccgggtaacgacgacgcaatccgtgctgtgaccctgtacctgggcgctgttgctgcaaccgtacgtgaaggccgttctcaggatctggcttcccaggcggaagaaagcttcgtagaagctgagtaataaggcacgctcgtacgagcccttatagaccaggtagtacacgtttggttagggggcctgcatatggccccctttttcacttttatatctgtgcggtttaatgccgggcagatcacatctccgaggattttagaatggctgaaattaccgcatccctggtaaaagagctgcgtgagcgtactggcgcaggcatgatggattgcaaaaaagcactgactgaagctaacggcgacatcgagctggcaatcgaaaacatgcgtaagtccggtgctattaaagcagcgaaaaaagcaggcaacgttgctgctgatggcgtgatcaaaaccaaaatcgacggcaactacggcatcattctggaagttaactgccagactgacttcgttgcaaaagacgctggtttccaggcgttcgcagacaaagttctggacgcagctgttgctggcaaaatcactgacgttgaagtactgaaagcacagttcgaagaagaacgtgttgcgctggtagcgaaaattggtgaaaacatcaacattcgccgcgttgctgcgctggaaggcgacgttctgggttcttatcagcacggtgcgcgtatcggtgttctggttgctgctaaaggcgctgacgaagagctggttaaacacatcgctatgcacgttgctgcaagcaagccagaattcatcaaaccagaagacgtatccgctgaagtggtagaaaaagaataccaggtacagctggatatcgcgatgcagtctggtaagccgaaagaaatcgcagagaaaatggttgaaggccgcatgaagaaattcaccggcgaagtttctctgaccggtcagccgttcgttatggaaccaagcaaaactgttggtcagctgctgaaagagcataacgctgaagtgactggcttcatccgcttcgaagtgggtgaaggcatcgagaaagttgagactgactttgcagcagaagttgctgcgatgtccaagcagtcttaattatcgaaaaggagccgcctgagggcggcttctttttgtgcccatcttgtaaattcagctaacccttgtggggctgcgctgaaaagcgacgtacaatgtcgctagtattaattcatttcaatcgttgacagtctcaggaaagaaacatggctaccaatgcaaaacccgtctataaacgcattctgcttaagttgagtggcgaagctctgcagggcactgaaggcttcggtattgatgcaagcatactggatcgcatggctcaggaaatcaaagaactggttgaactgggtattcaggttggtgtggtgattggtgggggtaacctgttccgtggcgctggtctggcgaaagcgggtatgaaccgcgttgtgggcgaccacatggggatgctggcgaccgtaatgaacggcctggcaatgcgtgatgcactgcaccgcgcctatgtgaacgctcgtctgatgtccgctattccattgaatggcgtgtgcgacagctacagctgggcagaagctatcagcctgttgcgcaacaaccgtgtggtgatcctctccgccggtacaggtaacccgttctttaccaccgactcagcagcttgcctgcgtggtatcgaaattgaagccgatgtggtgctgaaagcaaccaaagttgacggcgtgtttactgctgatccggcgaaagatccaaccgcaaccatgtacgagcaactgacttacagcgaagtgctggaaaaagagctgaaagtcatggacctggcggccttcacgcttgctcgtgaccataaattaccgattcgtgttttcaacatgaacaaaccgggtgcgctgcgccgtgtggtaatgggtgaaaaagaagggactttaatcacggaataattcccgtgatggataaataagggtaagattccgcgtaagtatcgcgggggatcttacccgtaatatgtttaatcagggctatacttagcacacttccactgtgtgtgactgtctggtctgactgagacaagttttcaaggattcgtaacgtgattagcgatatcagaaaagatgctgaagtacgcatggataaatgcgtagaagcgttcaaaacccaaatcagcaaaatacgcacgggtcgtgcttctcccagcctgctggatggcattgtcgtggaatattacggcacgccgacgccgctgcgtcagctggcaagcgtaacggtagaagattcccgtactctgaaaatcaacgtgtttgatcgttcaatgtctccggccgttgaaaaagcgattatggcgtccgatcttggcctgaacccgaactctgcgggtagcgacatccgtgttccgctgccgccgctgacggaagaacgtcgtaaagatctgaccaaaatcgttcgtggtgaagcagaacaagcgcgtgttgcagtacgtaatgtgcgtcgtgacgcgaacgacaaagtgaaagcactgttgaaagataaagagatcagcgaagacgacgatcgccgttctcaggacgatgtacagaaactgactgatgctgcaatcaagaaaattgaagcggcgctggcagacaaagaagcagaactgatgcagttctgatttcttgaacgacaaaaacgccgctcagtagatccttgcggatcggctggcggcgttttgctttttattctgtctcaactctggatgtttcatgaagcaactcaccattctgggctcgaccggctcgattggttgcagcacgctggacgtggtgcgccataatcccgaacacttccgcgtagttgcgctggtggcaggcaaaaatgtcactcgcatggtagaacagtgcctggaattctctccccgctatgccgtaatggacgatgaagcgagtgcgaaacttcttaaaatgatgctacagcaacaggggagccgcaccgaagtcttaagtgggcaacaagccgcttgcgatatggctgcgcttgaggatgttgatcaggtgatggcagccatttgttggcgctgctgggctgttacctacgcttgctgcgatccgcgcgggtaaaaccattttgctggccaataaagaatcactggttacctgcggacgtctgtttatggacgccgtaaagcagagcaaagcgcaattgttaccggtcgatagcgaacataacagctatttttcagagtttaccgcaacctatccagcataatctgggatacgctgaccttgagcaaaatggcgtggtgtccattttacttaccgggtctggtggccctttccgtgagacgccattgcgcgatttggcaacaatgacgcccgatcaagcctgccgtcatccgaactggtcgatgggacgtaaaatttccgtcgattcggctaccatgatgaacaaaggtctggaatacattgaagctcgttggctgtttaacgccagcgccagccagatggaagtgctgattcacccgcagtcagtgattcactcaatggtgcgctaccaggacggcagtgttctggcgcagctgggtgaaccggatatgcgtacgccaattgctcacaccatggcatggccgaatcgcgtgaactctggcgtgaagccgctcgatttttgcaaactaagtgcgttgacatttgccgcaccggattatgatcgttatccatgtctgaaactggcgatggaggcgtttgaacaaggccaggcagcgacgacagcattgaatgccgcaaatgaaatcaccgtggctgcttttcttgcgcaacaaatccgctttacggatatcgctgcgttgaatttatccgtactggaaaaaatggatatgcgcgaaccacaatgtgtggatgatgtgttatctgttgatgcgaacgcgcgtgaagtcgccagaaaagaggtgatgcgtctcgcaagctgaggataatccggctacagagagtcgcgctatttgttagcgtagggcttcagtgatatagtctgcgccatctgatcgtaagtagttggctttataaggtcaggtatgccgtggttttacacggcttttttttgtataggcttcagtattcctgagtaccgtaaaccctgtcagggaataagaaacgcgtgatgttgtctgctactcaaccacttagcgaaaaattgccagcgcatggctgtcgtcatgttgcgatcattatggacggcaatggtcgctgggcaaaaaagcaagggaagattcgtgcctttgggcataaagccggggcaaaatccgtccgccgggctgtctcttttgcggccaacaacggtattgaggcgttaacgctgtatgcctttagtagtgaaaactggaaccgaccagcgcaggaagtcagtgcgttaatggaactgtttgtgtgggcgctagatagcgaagtaaaaagtctgcaccgacataacgtgcgtctgcgtattattggcgataccagtcgctttaactcgcgtttgcaagaacgtattcgtaaatctgaagcgctaacagccgggaataccggtctgacgctgaatattgcggcgaactacggtggacgttgggatatagtccagggagtcaggcaactggctgaaaaggtgcagcaaggaaacctgcaaccagatcagatagatgaagagatgctaaaccagcatgtctgtatgcatgaactggcccctgtagatttagtaattaggactgggggggagcatcgcattagtaactttttgctttggcaaattgcctatgccgaactttactttacagatgttctctggcccgatttcgatgaacaagactttgaaggggcgttaaatgcctttgctaatcgagagcgtcgtttcggcggcaccgagcccggtgatgaaacagcctgatgggggtcgcttttgctgaagtatcgcctgatatctgcttttgtgttaatacccgtcgtcatcgcggcgttgtttctgttgccgccggtggggttcgccattgtaacgctggtggtctgtatgctggcagcgtgggaatggggacagcttagcggttttaccactcgttcgcagcgagtatggttggcggtgttatgcgggttattgttggcgctgatgctttttctgttgccggaatatcaccgaaatattcatcaaccgctggttgaaatctcactttgggcttcgctgggttggtggattgtcgcgctattgctggtgctgttttacccaggttccgcagcaatctggcgtaactctaaaacattgcgcattatttttggcgtgctaaccattgttcccttcttctggggcatgctggcgttacgggcctggcactacgacgagaatcattacagtggcgcaatatggctgctctatgtcatgatcctggtatggggcgctgactctggcgcatatatgtttggcaaattgtttggtaaacataaactggcaccgaaggtttctccgggtaaaacctggcaaggctttatcggtggactcgcgaccgcagcggtaatctcatggggttatggcatgtgggtgaatctcgacgtcgctcccgtcaccttactcatttgctctattgtcgcagcgttagcctcagtgctcggcgatctgaccgaaagtatgtttaagcgtgaagcaggaattaaggacagcggtcatttaattccaggacacggtggtattttagatcgtattgatagcctgacggctgcggtaccggtctttgcttgcttgttgttactggtattcaggacgctttaacggaaggtaatatgctgagttttctctgggatttggcttcgttcatcgttgcactgggtgtacttatcaccgtgcatgaatttggtcatttctgggttgcccggcgttgtggtgttcgcgttgagcgtttctcaatagggtttggtaaggcgctctggcggcgaactgataagctcggcaccgaatatgttatcgccctgatcccgttgggcggttatgtcaaaatgctggatgagcgcgcagaaccggtcgttccggaactccgccaccatgccttcaataataaatctgtcggccaacgagcggcgattattgccgcaggtccggttgcaaacttcatttttgctatctttgcctactggctggtttttattattggtgtgcctggcgtacgtcccgtggttggtgaaatagcagccaattcgatagctgcggaagcacaaattgcaccaggtacggaactaaaagccgtagatggtatcgaaacgcctgattgggatgccgtgcgtttgcagttggtcgataaaattggcgatgaaagcaccaccattacggtagcgccatttggcagcgaccaacggcgggatgtaaagctcgatttacgtcactgggcgtttgagcctgataaagaagatccggtatcttcgttggggattcgtcctcgtgggccgcaaattgaacctgtactggaaaatgtgcagccaaactcggcggcaagcaaggcaggtttgcaagcaggcgacaggatcgttaaagtcgatggtcagcccttaacgcagtgggtgacctttgtgatgcttgtccgggataacccgggtaaatccttagcgttagaaatcgaaaggcaggggagtcccttgtctttgacattaatcccggagagtaaaccgggtaagggtaaagcgattggttttgtcggtattgagccgaaagtcattcctttgccagatgagtataaagttgtacgccagtatgggccgttcaacgctatcgtcgaagccacggacaaaacgtggcagttgatgaagctgacggtcagtatgctgggaaaattgatcaccggtgatgtgaaactgaacaacctcagtgggccgatctctatcgccaagggggctgggatgacagcggaactcggggtagtttattacctgccgtttcttgcgcttattagcgtgaacttagggataattaacctgtttccgttgcccgtacttgacggggggcatctgctgttccttgcgatcgaaaagatcaagggcggaccggtatccgagcgggttcaagacttttgttatcgcattggctcgattctgctggtgctgttaatggggcttgcacttttcaatgatttctctcggttatgagagttagttaggaagaacgcataataacgatggcgatgaaaaagttgctcatagcgtcgctgctgtttagcagcgccaccgtatacggtgctgaagggttcgtagtgaaagatattcatttcgaaggccttcagcgtgtcgccgttggtgcggccctcctcagtatgccggtgcgcacaggcgacacggttaatgatgaagatatcagtaataccattcgcgctctgtttgctaccggcaactttgaggatgttcgcgtccttcgtgatggtgatacccttctggttcaggtaaaagaacgtccgaccattgccagcattactttctccggtaacaaatcggtgaaagatgacatgctgaagcaaaacctcgaggcttctggtgtgcgtgtgggcgaatccctcgatcgcaccaccattgccgatatcgagaaaggtctggaagacttctactacagcgtcggtaaatatagcgccagcgttaaagctgtcgtgaccccgctgccgcgcaaccgtgttgacctaaaactggtgttccaggaaggtgtgtcagctgaaatccagcaaattaacattgttggtaaccatgctttcaccaccgatgaactgatctctcatttccaactgcgtgacgaagtgccgtggtggaacgtggtaggcgatcgtaaataccagaaacagaaactggcaggcgaccttgaaaccctgcgcagttactatctggatcgcggttatgcccgtttcaacatcgattctacccaggtcagtctgacgccagataaaaaaggtatttacgtcacggtgaacatcaccgaaggcgatcagtacaagctttctggcgttgaagttagcggcaatcttgccgggcactccgctgaaattgagcaactgactaagatcgagccgggcgagctgtataacggcaccaaagtgaccaaaatggaagatgacattaaaaagcttcttggtcgctatggttatgcctatccgcgcgtacagtcgatgcctgaaattaacgatgccgacaaaaccgttaaattacgcgtgaacgttgatgcgggtaaccgtttctatgtgcgtaagatccgttttgaaggtaacgatacctcgaaagatgccgtcctgcgtcgcgaaatgcgtcagatggaaggtgcatggctggggagcgatctggtcgatcagggtaaggagcgtctgaaccgtctgggcttctttgaaactgtcgataccgatacccaacgtgttccggggagcccggatcaggttgatgtagtttacaaggtgaaagaacgtaacaccggtagcttcaacttcgggattggttacggtactgaaagtggcgtgagcttccaggctggtgtgcaacaggataactggttaggtacgggttatgctgttggtatcaacgggaccaaaaacgattaccagacctatgctgaactgtcggtaaccaacccgtacttcaccgtagatggcgtaagcctcggtggtcgtctcttctataatgacttccaggcagatgacgccgacctgtccgactataccaacaagagttatggtacagacgtgacgttgggcttcccgatcaacgaatataactcgctgcgtgcaggtctgggttatgtacataactccctgtccaacatgcagccgcaggttgcgatgtggcgttatctgtactctatgggtgaacatccgagcacctctgatcaggataacagcttcaaaacggacgacttcacgttcaactatggttggacctataacaagcttgaccgtggttacttcccgacagatggttcacgtgtcaacctgaccggtaaagtgaccattccgggatcggataacgaatactacaaagtgacgttagacacggcgacttatgtgccgattgatgatgatcacaaatgggttgttctgggtcgtacccgctggggttatggtgatggtttaggcggcaaagagatgccgttctatgagaacttctatgccggtggttccagcaccgtgcgtggcttccagtccaataccattggtccgaaagcagtttacttcccgcatcaggccagtaattatgatccggactatgattacgaatgtgcgactcaggacggcgcgaaagatctgtgtaaatcggatgatgctgtaggcggtaacgccatggcggttgccagcctcgagttcatcaccccgacgccgtttattagcgataagtatgctaactcggttcgtacttccttcttctgggatatgggtaccgtttgggatacaaactgggattccagccaatattctggatatccggactatagtgatccaagcaatatccgtatgtctgcgggtatcgcattacaatggatgtccccattggggccgttggtgttctcctacgcccagccgttcaaaaagtacgatggagacaaggcagaacagttccagtttaacatcggtaaaacctggtaagtgttctccacaaaggaatgtagtggtagtgtagcgatgactttaggcgatcaatataagatcgccgggccacgcaaagaactgcaccctccggtgcaaatgggatggtaaggagtttattgtgaaaaagtggttattagctgcaggtctcggtttagcactggcaacttctgctcaggcggctgacaaaattgcaatcgtcaatatgggcagcctgttccagcaggtagcgcagaaaaccggtgtttctaacacgctggaaaacgagttcaaaggccgtgccagcgaactgcagcgtatggaaaccgatctgcaggctaaaatgaaaaagctgcagtccatgaaagcgggcagcgatcgcactaagctggaaaaagacgtgatggctcagcgccagacttttgctcagaaagcgcaggcttttgagcaggatcgcgcacgtcgttccaacgaagaacgcggcaaactggttactcgtatccagactgctgtgaaatcagttgccaacagccaggatatcgatctggttgttgatgcaaacgccgttgcttacaacagcagcgatgtaaaagacatcactgccgacgtactgaaacaggttaaataagtaatgccttcaattcgactggctgatttagcgcagcagttggatgcagaactacacggtgatggcgatatcgtcatcaccggcgttgcgtccatgcaatctgcacaaacaggtcacattacgttcatggttaaccccaaataccgtgagcatttaggcttgtgccaggcgtccgcggttgtcatgacccaggacgatcttcctttcgcgaaaagtgccgcgctggtagtgaagaatccctacctgacttacgcgcgtatggcgcaaattttagataccacgccgcagcccgcgcagaacattgcacccagtgcggtgattgacgcgacggcgaagctgggtaacaacgtatcgattggcgctaacgcggtgattgagtccggcgttgaactgggcgataacgtgattatcggtgccggttgcttcgtaggtaaaaacagcaaaatcggtgcaggttcgcgtctctgggcgaacgtaaccatttaccatgagatccagatcggtcagaattgcctgatccagtccggaacagtggtaggcgcagacggctttggttatgctaacgatcgtggtaactgggtgaagatcccacagattggtcgcgtaattattggcgatcgcgtggagatcggtgcctgcactaccattgatcgtggcgcgctggatgacactgttattggcaatggtgtgatcattgataaccagtgccagattgcacataacgtcgtgattggcgacaatacggcagttgccggtggcgtcattatggcgggcagcctgaaaattggtcgttactgcatgatcggcggagccagcgtaatcaacgggcatatggaaatatgcgacaaagtgacggttacgggcatgggtatggtgatgcgtcccatcactgaaccaggcgtctattcctcaggcattccgctgcaacccaacaaagtctggcgcaaaaccgctgcactggtgatgaacattgatgacatgagcaagcgtctgaaatcgcttgagcgcaaggttaatcaacaagactaacgttccatcttttgttcgccaaactttacggcctgtctcattcttacgattgcggcaggccgtgttattattgtcgtttcttatattttgacaggaagagtatcttgactactaacactcatactctgcagattgaagagattttagaacttctgccgcaccgtttcccgttcttactggtggatcgcgtgctggattttgaagaaggtcgttttctgcgcgcagtaaaaaatgtctctgtcaatgagccattcttccagggccatttccctggaaaaccgattttcccgggtgtgctgattctggaagcaatggcacaggcaacaggtattctggcgtttaaaagcgtaggaaaactggaaccgggtgagctgtactacttcgccggtattgacgaagcgcgctttaagcgcccggtcgtgcctggcgatcaaatgatcatggaagtcactttcgaaaaaacgcgccgcggcctgacccgttttaaaggggttgctctggtcgacggtaaagtagtttgcgaagcaacgatgatgtgtgctcgtagccgggaggcctgatacgtgattgataaatccgcctttgtgcatccaaccgccattgtggaagagggcgcgtcgattggcgcgaacgctcacattggtcctttttgtatcgttggaccccatgtcgaaattggtgagggtaccgtactgaaatctcacgttgtcgtgaatggtcatactaaaattggccgcgataatgagatttatcagttcgcctccatcggcgaagttaaccaggatctgaaatatgctggcgaaccgacccgcgtggaaatcggcgatcgtaaccgcattcgcgaaagcgtcaccattcatcgtggcacagtccagggcggtggattgacgaaggtgggcagcgacaacttactgatgatcaatgcgcacattgcgcacgattgtacggtaggtaaccgctgcatcctcgccaacaacgcaacgctggcgggtcacgtatcggttgacgacttcgcgatcatcggcggcatgaccgcagtccatcagttctgcatcattggtgcgcatgtgatggttggcggctgctccggtgtggcgcaggacgtccctccttatgtcattgcgcagggtaaccacgcaacgccgttcggtgtcaatatcgaagggctgaagcgccgcggattcagccgtgaggcgattaccgctatccgcaatgcgtataagctgatttatcgtagcggtaaaacgctcgatgaagtgaaaccggaaattgctgaactggcggaaacatatccggaagtgaaagcctttaccgatttctttgcacgctcaacgcgcggtctgattcgttaatgactgaacagcgtccattaacgattgccctggtcgccggagaaacctccggcgatatcctgggggccggtttaatccgcgctctgaaagaacgtgtgcccaacgcccgctttgttggtgttgccgggccacgaatgcaggctgaaggctgcgaagcctggtacgaaatggaagaactggcagtgatgggcattgttgaagtgctaggtcgtctgcgtcgcttactacatattcgtgccgatctgacaaagcgttttggcgaattgaagccagatgtttttgttggtattgatgcgcctgacttcaatattactcttgaaggtaaccttaaaaagcagggtatcaaaaccattcattacgtcagcccgtccgtctgggcgtggcgacagaaacgcgttttcaaaataggcagagccaccgatctggtgctcgcatttctgcctttcgaaaaagcgttttatgacaaatacaacgtaccgtgccgctttatcggtcataccatggctgatgccatgccattagatccagataaaaatggtgcccgtgatgtgctggggatcccttacgatgcccactgtctggcattgttgccgggcagccgtggtgcagaagtcgaaatgcttagtgccgatttcctgaaaacggcccagcttttgcgccagacatatccggatctcgaaatcgtggtgccgctggtgaatgccaaacgccgcgagcagtttgaacgcatcaaagctgcagtcgcgccagacctgtcggttcatttgctggatggaatgggccgtgaggcgatggtcgccagtgatgcggcgctactggcgtcgggtacggcagcactggagtgtatgttggctaaatgcccgatggtagtgggatatcgcatgaagcctttcaccttctggctggcgaagcgactggtgaaaactgattatgtctcgctgccaaatctgctggcgggcagagagttagtcaaagagttattgcaggaagagtgtgagccgcaaaaattggctgcggcgctgttaccgctgttggcgaacgggaaaaccagccatgcgatgcacgacaccttccgcgagctgcatcagcagatccgctgcaatgccgatgagcaggcggcacaagccgttctggagttagcacaatgatcgaatttgtctatccgcacacgcagctggttgcgggtgtggatgaagtcggacgcgggccgttagttggcgcggtcgtcaccgctgcggtgatccttgacccggcgcgcccaattgccgggctgaatgattccaaaaagctgagcgaaaaacgccgtctggcgctctgtgaagagatcaaagagaaagcgttgagctggagtctgggccgcgcggaaccccacgaaatcgacgaactgaacattcttcatgcgaccatgctggcgatgcagcgcgccgtcgcggggctgcatattgcgccggaatatgtgttgattgatggtaaccgctgcccaaaattaccgatgccttcgatggcagtggtgaaaggcgatagccgcgtaccggaaatcagtgctgcgtccatcctggcgaaagtgacgcgcgacgccgaaatggcggcgctggatattgttttcccgcaatatggttttgcccaacacaaagggtatccaaccgcttttcatctggaaaaactggctgaatatggcgcgactgaacatcatcgtcgtagctttgggcctgtcaaacgcgcactgggacttgcgtcctgattcttgtgtcgagattaagtaaaccggaatctgaagatgtctgaaccacgtttcgtacacctgcgggtgcacagcgactactcgatgatcgatggcctggccaaaaccgcgccgctggtaaaaaaggcggcggcgttgggtatgccagcactggcgatcaccgatttcaccaacctttgcggtctggtgaagttctacggagcgggacatggcgcagggattaagcccatcgtcggggcagattttaatgtccagtgcgacctgctgggtgatgagttaacccacctgacggtgctggcggcgaacaatatcggctatcagaatctgacgttgctgatctcaaaagcgtatcagcgcgggtacggtgccgccgggccgatcatcgatcgcgactggcttatcgaattaaacgaagggctgatcctcctttccggcgggcgcatgggcgacgtcgggcgcagtcttttgcgtggtaacagcgcgctggtagatgagtgcgttgcgttttatgaagagcacttcccggatcgctattttctcgagctgatccgaaccggcaggccggacgaagaaagttatctgcacgcggcagtggaactggcggaagcgcgcggtttgcccgtcgtggcgaccaatgacgtgcgctttatcgacagcagcgactttgacgctcacgaaatccgcgtcgcgatccatgacggctttactctcgacgatcccaaacgcccgcgtaattattcgccgcagcaatatatgcgcagcgaagaggagatgtgcgagctgtttgccgacatccccgaagcccttgccaacactgttgagatcgccaaacgctgtaacgtgactgtgcgtctgggtgaatacttcctgccgcagttcccgaccggggacatgagcaccgaagattatctggtcaagcgtgcaaaagaaggcctggaagagcgtctggcatttttattccctgacgaggaagaacgtcttaagcgtcgcccggagtatgacgagcgtctggatactgaacttcaggttatcaaccagatgggcttcccgggttacttcctcatcgttatggaatttatccagtggtcgaaggataacggcgtaccggtagggcctggccgtggttccggtgcagggtcactggtggcctacgcgctgaaaattaccgacctcgatccgctggaatttgacctgctgttcgaacgtttccttaacccggaacgtgtctccatgcctgacttcgacgttgacttctgtatggagaaacgtgaccaggttatcgaacacgtggcggacatgtacggtcgcgatgcggtatcgcagatcatcaccttcggtacgatggcggcgaaagcggtgatccgcgacgtaggtcgtgtactggggcatccgtacggatttgtcgatcgtatctcgaaactgatcccgcccgatccggggatgacgctggcgaaagcgtttgaagccgagccgcaactgccggaaatctacgaagcggatgaagaagttaaggcgctgatcgacatggcgcgcaaactggaaggggtcacccgtaacgccggtaagcacgccggtggggtggttatcgcgccgaccaaaattaccgattttgcgccgctttattgcgatgaagagggcaaacatccggttacccagtttgataaaagcgacgttgaatacgccgggctggtgaagttcgacttccttggtttgcgtacgctcaccatcatcaactgggcgctggagatgatcaacaagcggcgggcgaagaatggcgagccgccgctggatatcgccgcgatcccgctggatgacaagaaaagtttcgacatgctgcaacgctctgaaaccacggcggtattccagcttgaatcgcgcggcatgaaggatctgatcaaacgtctgcaacctgactgcttcgaagatatgatcgcactggtggcgctattccgtcccggtccgttgcaatcagggatggtggataactttatcgaccgtaaacatggtcgcgaagagatctcctatccggatgtgcagtggcagcatgaaagcctgaaaccggtactggagccaacctacggcattatcctgtatcaggaacaggtcatgcagattgcccaggtgctttctggttataccctcggtggcgcggatatgctgcgtcgtgcgatgggtaagaaaaagccggaagagatggccaagcagcgttctgtatttgctgaaggcgcagaaaagaacgggatcaacgccgaactggcgatgaaaatcttcgacctggtggagaaattcgccggttacggatttaacaaatcgcactctgcggcctatgctttggtgtcatatcaaacgttatggctgaaagcgcactatccggcggagtttatggcggcagtaatgaccgccgatatggacaacaccgagaaggtggtgggcctggtggatgagtgctggcggatggggctgaaaatcctgccaccagatataaactccggtctttaccatttccacgtcaacgacgacggcgaaatcgtgtatggtattggcgcgatcaaaggggtaggtgaaggtccgattgaggcgatcatcgaagcccgtaataaaggcggctatttccgtgaactgtttgatctctgcgcccgtacagacaccaaaaagttaaaccggcgagtgctggaaaaactgatcatgtccggggcgtttgaccgtcttgggccacaccgtgcggcgctgatgaactcgctgggcgatgcgttaaaggcggctgatcaacacgcgaaagcagaagccatcggtcaggccgatatgttcggcgtgctggcagaagagccggaacaaattgaacaatcctacgccagttgccaaccgtggccggagcaggtggtgttagatggggaacgtgaaacgttaggtctgtacctgacgggacaccctatcaaccagtatttaaaagagattgagcgttatgtcggaggcgtaaggctgaaagacatgcacccgacagaacgtggtaaagtcaccacggctgcggggctcgttgttgctgcgcgggttatggtcaccaagcgcggcaatcgtatcggtatctgcacgctggatgaccgttccgggcggctggaagtgatgttgtttactgacgccctggataaataccagcaattgctggaaaaagaccgcatacttatcgtcagcggacaggtcagctttgatgacttcagcggtgggcttaaaatgaccgctcgcgaagtgatggatattgacgaagcccgggaaaaatatgctcgcgggcttgctatctcgctgacggacaggcaaattgatgaccagcttttaaaccgactccgtcagtctctggaaccccaccgctctgggacaattccagtacatctctactatcagagggcggatgcacgcgcgcggttgcgttttggcgcgacgtggcgtgtctctccgagcgatcgtttattaaacgatctccgtggcctcattggttcggagcaggtggaactggagtttgactaatacaggaatactatgagtctgaatttccttgattttgaacagccgattgcagagctggaagcgaaaatcgattctctgactgcggttagccgccaggatgagaaactggatattaatatcgatgaagaagtgcatcgtctgcgtgaaaaaagcgtagaactgacgcgtaaaatcttcgccgatctcggtgcatggcagattgcgcaattggcacgccatccacagcgtccttataccctggattacgttcgcctggcctttgatgaatttgacgaactggctggcgaccgcgcgtatgcagacgataaagctatcgtcggtggtatcgcccgtctcgatggtcgtccggtgatgatcattggtcatcaaaaaggtcgtgaaaccaaagaaaaaattcgccgtaactttggtatgccagcgccagaaggttaccgcaaagcactgcgtctgatgcaaatggctgaacgctttaagatgccaatcatcacctttatcgacaccccgggggcttatcctggcgtgggcgcagaagaacgcggtcagtctgaagccattgcacgcaacctgcgtgaaatgtctcgccttagcgtaccgactatctgcactgttatcggtgaaggtggttctggcggcgcactggcaattggcgtgggcgataaagtgaatatgctgcaatacagcacctattccgttatctcgccggaaggttgcgcgtccattctgtggaagagcgccgacaaagcaccgctggcggctgaagcgatggggatcatcgctccgcgtctgaaagaactgaaactgatcgactccatcatcccggaaccgctgggcggcgctcaccgtaacccggaagcgatggcggcgtctctgaaagcgcaactgctggcggatctggccgatctcgacgtgttaagtactgaagatttaaaaaatcgtcgttatcagcgcctgatgagctacggctacgcgtaatcggcaaatgttctgaaaggggtcacttcggtggcccttttttatcgtcacggtttgagcaggctatgattaaggaaggattttccaggaggaacacatgaacatcattgccattatgggaccgcatggcgtcttttataaagatgagcccatcaaagaactggagtcggcgctggtggcgcaaggctttcagattatctggccacaaaacagcgttgatttgctgaagtttatcgaacataacccacgaatttgcggcgtgatttttgactgggatgagtacagtctcgatttatgtagcgatatcaatcaacttaatgaatatctcccgctttatgccttcatcaacacccactcgacgatggatgtcagcgtgcaggatatgcggatggcgctctggttttttgaatatgcgctggggcaggcggaagatatcgccattcgtatgcgtcagtacaccaacgaatatcttgataacattacgccgccgttcacgaaagccttgtttacctacgtcaaagagcggaagtacaccttttgtacgccggggcatatgggcggcaccgcatatcaaaaaagcccggttggctgtctgttttatgattttttcggcgggaataccctcaaggcggacgtctctatttcggtcaccgagcttggttcgttgctcgaccacaccgggccacacctggaagcggaagagtacatcgcgcggacgtttggcgcggaacagagttatatcgttaccaacggaacatcgacgtcgaacaaaattgtgggtatgtacgccgcgccatccggcagtacgctgttgatcgaccgcaattgtcataaatcgctggcgcatctgttgatgatgaacgatgtagtgccagtctggctgaaaccgacgcgtaatgcgttggggattctgggtgggatcccgcgcggtgaatttactcgcgacagcatcgaagagaaagtcgctgccaccacgcaggcacaatggccggttcatgcggtgatcaccaactccacctatgatggcttgctctacaacaccgactggatcaaacagacgctggatgtcccgtcgattcacttcgattctgcctgggtgccgtacacccattttcatccaatctaccagggtaaaagtggtatgagcggcgagcgtgttgcaggaaaagtgatcttcgaaacgcagtcgacccacaaaatgctggcggcgttatcgcaggcgtcgctgatccacattaaaggtgagtatgacgaagaggcgtttaacgaagcctttatgatgcataccaccacctcgcccagttatcccattgttgcttctgttgagacggcggcggcgatgttgcgtggtaatccgggcaaacggctgattaaccgttcagtagaacgagctctgcattttcgcaaagaggtccagcggctgcgggaagagtctgacggctggtttttcgatatctggcaaccgccgcaggtggatgaagccgaatgctggcccgttgcgcctggcgaacagtggcacggctttagcgatgcggatgccaatcacatgtttctcgatccggttaaagtcactattttgacaccggggatggacgagcagggcaatatgagcgaggaggggatcccggcggcgctggtggcaaaattcctcgacgaacgtgggatcgtagtagagaaaaccggcccttataacctgctgtttctctttagtattggcatcgataaaaccaaagcaatgggattattgcgtgggttgacggaatttaagcgctcttacgatctcaacctgcggatcaaaaatatgctgcccgatctctatgcagaagatcccgatttctaccgcaatatgcgtattcaggatctggcgcaagggatccataagctgattcgtaaacacgatcttcccggtttgatgttgcgggcatttgataccttgccggagatgatcatgacgccacatcaggcatggcagagacagattaaaggcgaagtagaaaccattgcgctggaacaactggtcggtagagtatcggcaaatatgatcctgccttatccacccggcgtaccgctgctgatgccgggagaaatgcttaccgaagagagccgcacggtactcgattttctactgatgctttgttccgtagggcaacattaccccggttttgaaacggatattcacggcgcgaaacaggacgaagacggtgtttaccgcgtacgagtcctaaaaatggcaggataacttgccagagcggcttccgggcgagtaacgtgctgttaacaaataaaggagacgttatgctgggtttaaaacaggttcaccatattgcgattattgcgacggattatgcgatgagcaaagctttctactgcgatattcttggtttcacgctgcaaagcgaagtctatcgcgaagcgcgcgactcgtggaaaggggatttggcgcttaatgggcaatatgtgattgagcttttctcatttccgttcccgccggagcgccccagccgaccggaagcttgcggcctgcgtcatctggcttttagcgttgatgatatcgatgcggcagtggcgcaccttgaaagccataacgtgaagtgtgaagccatccgtgtcgatccctacacgcaaaaacgcttcacgttctttaacgatccggacgggctgccgttggaactgtatgagcagtaaggcttgtcatcgccgcatttgcccggtaacgtgcccggcattgctactgtaaaatcgcaccatcatgacactcacgctcaatagacaacttctctcctcacgccagattctggtggcctttagcggcggccttgattctactgtcttactgcatcaactggtgcagtggcggacggaaaatccgggcgtcactctgcgcgctatccatgtgcatcacggtttaagcgccaatgctgatgcatgggtgaaacattgtgaaaacatctgccaacagtggcaggtgccgctggtggtcgaacgtgtgcagcttgcgcaagaggggctaggtattgaggctcaggctcggcaggcgcgttatcaggcatttgcccgcaccttgttacccggcgaagtgctggttacagcgcaacatcttgacgatcaatgtgaaacctttctgctggcgctaaaacgcggtagcggccctgccgggctttcggctatggcggaagtttcggagtttgccggaacacagcttatccgcccgttgcttgcccgcacgcggggggaactggagcagtgggcgttggcgcatggtttacgctggattgaagacgaaagtaatcaggatgatagctacgatcgtaactttctgcgcctgcgcgtagtgccgttattgcagcagcgttggccgcattttgccgaagcaacagcgcgcagcgccgcactttgcgctgaacaagagagcctgttagatgaactgctggcggatgatttagcgcactgtcaaactccgcaggggacgctgcagattgcgccaatgctggcgatgagtgatgcccgtcgcgcggcgattatccgccgctggctagcagggcagaatgcaccgatgccttcccgcgacgcgttggtgaggatctggcaggaagtggcgctggcgcgggaagatgcctccccctgtttacgtttgggcgcgtttgaaatccgccgctatcagtcgcaactatggtggattaaatccgttgccgggcaaagcgaaaccattctgccgtggcagacgtggctacaaccgctggaattaccggcggggctgggaagtgtacagcttactgcgggaggcgatattcgccctccgcgtgcagatgaagcggtcagcgtgcgtttcaaagcgccaggactgctgcatattgtcgggcgcaacggcggacgtaagctgaagaaaatctggcaagagttaggcgttccgccgtggctacgtgataccacgccactgctgttttatggcgaaacgctgattgcggcggcaggggtatttgtgacgcaagaaggtgtggctgtaggtgagaatggcgtcagttttgtctggcagaaaacgcttagtcaagtgaaagccggataagacgcatcaaacgtcgcatccggcgaaagtcaatcaggactcgctcaccaccaccgtaccgatttccgggtggctaaagctggtaattttatccagacgcagctcgcgggttgcaccagcggcctcgacgaccagatactccacatttttgcgggagactaaatcgctggccttcgcctgcaatttttcgccatctttcagctcaagtgtcagcattaaatgatgctggcaggcgagctcaagattatcgtaatcatcacaattgattggttgatacgtatcattcattgacataatcgctcaccagtaagtttgccgcagcgtatgctgctttttccctgacagcctcagaaagggtgtcgtcggcagccatttcattcagcactttcaaaacgcagcccagcgcgtccggaacgtatcctaagtctccgctggcgatttccgcgtaccgcttgcgtattaactcacaatatttttccacatgccctcctgtcagcactctgacttaaccgtggatgcaagtctaagcctacgaagataaactctgtttcgcaaggtgactataccacactcatttctgcaatatcagcgccgcaactgcacgtattccgttacaatggcctcctgattcgaaaggagttttcttatggcgcttaaagcgacaatttataaagcgacggttaatgtggccgatctcgaccgcaaccagtttctcgatgcctctctgacgttggcgcgccatccttcagaaacccaggagcgtatgatgctgcgcctgctggcgtggctaaaatatgccgatgaacgtctgcaatttacccgtggtttgtgtgccgatgatgagccggaagcgtggctgcgtaacgatcatttgggtattgatttgtggattgagctggggctgccggatgagcgacggattaagaaagcctgcacccaggccgcagaagtggcgctgtttgcctataatagtcgggcggcgcaaatctggtggcagcaaaatcagagcaaatgtgcgcagtttgccaatctttccgtctggtatctggacgacgagcagctggcgaaagtgagcggctttgccgatcgtaccatgacgctgcaggcaacgattcaggatggtgttatctggttatcggatgataagaataatctggaagtgaacttaaccgtctggcaacaaccttcatgattgtgatttcccgacatgttgctatccctgatggcgagtttgagatcaccgccattcgtgcgcagggcgcgggcgggcagcatgttaataagacctcaacggctattcatctgcgttttgacattcgggcgtccagcctgccagagtattacaaagagcgtctgctcgccgccagccatcatttgatcagcagtgacggagtgattgtcattaaggcacaggaataccgaagtcaggaactgaaccgcgaagcggcgctggcccggctggtggcagtgattaaagatttaacaacagaacaaaaagcccgaagacctacgcggcccacccgtgcatcgaaagagcgcaggctggcatcgaaagcacaaaaatcaagcgtgaaggcgatgcgcggcaaagtgcgcagcggtcgggaataaaaagaaggaatggatggtgaaaaaagcgatagtgacagcgatggctgtaatcagcctctttactctgatgggatgtaataatcgggccgaagtcgatacgctttctccggcgcaggctgccgaattgaaaccgatgccgcaaagttggcgcggcgtgctgccgtgtgctgattgcgaaggaatcgaaacctctctgttcctcgaaaaagacggaacctgggtgatgaatgagcgttatctgggggctcgtgaagaaccttcctccttcgcttcctacggtacatgggcgcgaaccgctgacaagctggtattaaccgatagcaaaggtgaaaagtcatattatcgcgcgaaaggagatgcgctggagatgctcgatcgtgaaggtaatccgattgaatcgcagttcaactacacgctggaaccggcacaatccagcttacccatgacgccgatgaccctgcggggcatgtatttttatatggctgatgcggcgaccttcactgattgcgcgaccggaaaacgttttattgtggcgaataacgcagagctggagcgtggctacctggctgcgcgcggtaacagtgaaaaaccagtgttactgtcagttgaaggtcactttacgctggaggctaatcccgataccggtgcgccgactaaagtattagcgcccgatacggcaggtaaattttacccaaaccaggattgcagtagtttggggctgtaacccgtcttgagacagaaacaaatgaaatattgcctcatgcgctgcgcttatcaggcctaaagcatacaatgcaatattttgaattagcacgattttgtaggccggataaggcgtttgaactgaaccccaaaacctggacagtttcagttaaccggctttttgatactcagtccggtattctaccgggctgagtcccccaagactgagttttattcttttttgattccagtaagttatgtattcgttaacggcattttccagctcttctacatttctgtagtcccggcgatagtacatttcttctttcaggtgaccaaagaagttctccattaccgcattatcaaggcagttgcccttgcgcgacatgctctgcactaaccctctgtccgccagggcggactgataactttttatccggtaatgccatccttgatcactgtggagcagcggtttctccccttcagcaaggctttccagacccttatttaacatccgcttcaccagctcttctgtaggcctgcaggccgtttcccacgccacgatttccccgttaaacaaatcaagtatcggggacaggtacagtttttgtccgccagccctgaattcggtgatatctgtcacccatttctcacagggagcttccgctttgaactgtcgctgaaggatattttctgcagcgagtcccatatttccccggtaagaccggtatttcttcaggcgcacaggagacttcaggccgagctgttgcatcagttttcgcaccgttttgccactgaacttaagacctcttttctgaagctcacaatggatccgccggtacccataacatccccggtgttcatggaagatggaggctatgagctgtttcacatcagcatacttgtccttagccttctgcagtgacagctggtagtacagcgtgcttctgccctgcggcctttaacaggtcagactggcagtgtccgtacctcaggctctggatgactttcgttttttctccagctcctggcgctttttttccagaagatgctcctgcatggctttcagatatgcattttctgcgcgaagataacgcagctcattcttcatctcttccggcgtcatgtttgcctcgttttcatgggtatcatcagaacgggtcatgcttttctccttcctgcgcctgataaaggcctcattaccagatttgcggtagccttttatccagtttttaaccgtgttgtggctgggaatgttaaaccgggcagctacccggggtagagactcagaatgcccgagagcataaagaaccacgcaaagtttatcttcaggagaatagctacgcttgtgtctgcaatccagtgcccgaggaccgtgaagaagaaaaagattaatccagtgtgagaggctggtgtgagaaagttgaaagagttttgccgtagaaatgatgcctgcatgaccagccaggtaatgatttacagcggcaagttttacttcaaatgaatgtttcataaactgcaccttcagatgtcagattatgtccaacatttggggtgcagttcagttcacgccgcatccggcattttgcgcacgaggctggcttttatcactgagtcagtccaacaaagcgacttgctttaatataaatccctggcttcaggtgcccaatatactgtaactgcgtttctggtttaaatgcagagacatcaccactacgcatatgcatcagatcggcagggctaatccagcctgattgcgccagcgtaagcggatgcccggctttggcaaatgcatcagtgacaaattccgaacaaaaccacgactttttgtctccttcgcccacactgcttaactgcgctttcgccaggccgctgacgcactgttgacgaaaatcctcggagaacggatttagtgagcacatctggcgaatcaccataaatggaataaattcgacaatgccgcgatagttataaccgctatctttgattttattggcgaacgcggtgatttctgtggcttgttgcggggtaaggtccgggactcgtaagacgaaaagcttatcactatgcttcatggcttttttaagggaaacaatctggacgccagcgcctgtcgcttcggcaacgttgttatctcccaaatagattgcaacgtgactcacagaggaagtgctgaatacgcggataccaaatgaggttaccccaaggcttgaggagaaaagcaaatcgccgggtttgagatctggttccgttatttcttttattgattgttcggtgaaagagctttgatgctggaatttaacagcccatgttttcgcctcggcatttaccactgtggctgatgagtctggctggctgatatcaacggtacaggacgaaagtaaaagaaagcaggggagaagcaggcggcagtacgcctttggtttatccattttatacaatccatgtaaaaaagggccccgaaattcaggaccctttctggcatcagcctttaatctgtttcaccagataatcgacgatgtcaccagtcttaattaactgtttctcgccgttacgacgatatttatattcgatatcatcgttgtcgaggttacggtcgcccagcacaatagtgtgcggaataccgatcagttccatatcagcaaacatcacgcccgggcgctctttgcggtcatccagcagcacttcgataccttgtgcgcgcagttcgctgtacagtttctcagcaagttcctgtacgcggaaggatttgtgcatgttcattggcagaatcgccacctggaacggcgcgatagcgtcaggccatacgatgccgcgttcgtcgtagttctgctcaatcgccgcagctaccacacgcgttacgccgataccgtagcaacccatcgtcaggatttggttacggccatcttcaccctgtacggaggctttcagtgcttcggagtacttggtacccagctggaagatgtgaccgacttcgataccacgtttgatcagcagcgtaccctgaccatccgggcttggatcgccagccaccacgttgcggatatcagcaatttccggagtagcgacatcgcgatcccagttgataccgaagtagtgtttaccatcgatgttagcaccagcagcgaaatcactcatcgccgcaacggtacggtcaatcaccaccggaatcggcatgtttaccggacccagtgaacccggaccggctttaaccacggcacgaatttcttcttcggtcgcaaaagtcagcgggctggcaacctgcggcagtttttctgctttaacttcgttcagctcgtggtcaccgcgcaccagcagcgcaaccagcgggaagctactgccttcaacggctttaaccagcagagtcttaaccgttttctcaatcggcagattgaactgttcaaccagttccgcgatggttttcgcgttcggcgtatcaaccagcgtcatttcctgggtagcagcagcgcgcggttctttcggcgcgatagcttctgccagttcaatgttcgctgcgtagtcagaagtatcggagaagaccacatcgtcttcaccgctctgcgccagcacctgaaattcgtgagaggcgctaccgccgatagaaccggtatcggcctgtacggcgcggaaatccagccccatgcggctgaagattttgctgtaggccgcatacattgcatcgtaggtttcctgcagggattcctgagaagtatggaaagagtaagcatctttcatcaggaattcgcgggaacgcatgacgccaaaacgcggacgcacttcgtcgcggaacttggtctggatctgatagaagttcagcggcagctgtttgtaagagctcagctcgttacgaatcaggtctgtaatcacttcttcatgagttgggccgagtacgaacggacggtcaccacggtcagcaatacgcagcaattccgggccatactgttcccaacgaccactctcttgccacagttcagatggctgaaccaccggcattaacacctcgatcgcaccggcgttgttcatctcttcacgcacgatgttttcgacttttttcagaacgcgcacgccggtcggcagccaggtatataacccggaggccagcttgcggatcatcccggcgcgcagcatcagctgatggctgatcacctcggcgtcggcaggtgtctccttgagagtggagagcaggtattggctagtacgcatgttgttacggttccagttggaaggtagaacaggctcaaggcgagcctgggacaaaaaaagtgatttagtttaccagtgcaaaagaaatgtcaaaagagaagggcgtgaatttaacgcggttccagcgcaaagacttcaaaacctgcgtcggtgacgcgccagcgaacgttaaaatcatgcagccagacggcataggttttgcccgtttcctcacctttacgataggccgggcgcgggtcctgcgccagtacttcgcggataaacagcgttaactgcggataacgcttctccagcgtcaaaagctgcttttcgacctctgcggtaaaacacaccgccatttctgccgctggcgcactttgcgcatagctggcactggcatcgggaagcgattcagcaaaggggagatacggtttgatatccactaccggcgtaccatcgaccagatccagactgccgagcttcagaatcacgctgtctttatggcaaacaacctccttcagctctaccagcgacataccaatcgggttagggcggaaagtggagcgcgtagcgaaaacacccattctggtattaccgccaagacgaggcggacgcacagtcggacgccagccgccttccatcgtttgatgaaagacgaaaaggatccataaatggctgaatgcttccaggccgcgaacggcgtcggcctggttgtagggagcaatgagatgtagttcgccgttggcgctttttaccagacctggctggcgcggaacggcgaatttttctttatagggcgagcgaataacgcctatttgctcgaactgaaaactgctcatttcgccgtgatgttaagcgcagaaccgatacatacagcctgacgatagcaacctggcgtaccgctggtaacttcgcagctatgcagtaataccgcattggctttcattttcgaggcgttgatttgcatccgcttacgtgcggttggaatgctcggcggagagtcctgattagaggcctggcaagagtcgccactgacttcaccgagatcgcggaacggtttgccgactaattcttctgcattggtataaattcggaccggcgtggcgcgcggcgctttcggttttgcaggctccgctttcggctggggtgcagtgctttgaacgggttcgacaggggatctgcttaacatggaacagccgcttagcatgagtgctactaaacagatcggtaaagcacgcatagtatttcctcaatgtatgatcaaaacgtcaatattgaatcaggcgcttgtaaaaatgacaagacgggcaagcgcccgtcctgaatgatattacaaattgtggaaacagcctaaatattaccagcctttaacagcgccgccgttaaacactttgtttgctgcttcgtaaacttcgtcagactgataagcctgaacgaatttcttcacgttttcggcgtctttgttgtcttcacgcgttacgatcaggtttacgtacggggactctttatcttcgacaaagataccgtctttcgctggagtcaggccaatctggctggcataggtggtattgataactgccagagcgatttgcgcgtcgtccagagagcgcggtagctgcggtgcttccagttcaacaattttcagattttttgggttctcaacaacatcaagaacggtcggcagcaggccaacgccatctttcagtttgatcaagcccactttttgcagcagcagcagtgaacgaccaaggttagttgggtcgtttggcacggcaacctgcgaaccatcctgcagttcatccagtgatttgattttcttggagtaaccagcaatcggataaacaaatgtgttgcctactgcgaccagtttgtagccacgatctttcagttgctgatcaaggtacggtttatgctggaaggcgttggcgtcgatatcgcctttgctcaatgcttcgtttggcagaacatagtcgttgaaggttaccagctcaacgtccaggccatatttgtctttcgcaactttctgcgcgacttctgcaacctgctgttcggcaccaacaatcacgccgactttaatgtggtttggatctttttcatcctgaccgcagcctaccagtgccagtgatccaatcagggctcccactgccgcaaaggttttgaatttgaacgccataccttattccttcttcaattatttatgttgtgttgaacgttacttgcgagtgacagcccggacgatgcggtcgcctgcgaactgaattaaataaaccagaatgaccagcaataccagtaccgtattcatcaccgtcgcgttgtagccgatgtagccatactgatagccaatctgacctaaaccaccggcaccgactgcaccacccatcgcggaataaccaaccagggtaatcagggtgatagttgccgcattcaccagacccggcaacgcttccggtaacagcactttacggacgatctgcattggcgtggcccccattgcgcgggaagcttcaattaacccggttgggatctccagcagagcgttctcgaccatacgggcaataaacggtgctgcaccaacggttaacggaacaatcgctgcctgcaatccaatcgatgtaccgacaataacgcgggtaaacggaatcatccataccagcaagataatgaacgggatggaacggaaaatgttcacaatcgcagaaatggtacgatacaacttcgcgttagcaataatttgccccggacgcgtgacataaagcagaacgccaaccggcagaccaatcacaaagccaaaaaaaccggatacgaaggtcattgccagcgtttcccatacgccacgaaccagcagccacatcatcggctcagacataacccagtacctctacttttacatggtgttcctgcagccaggcaatggcggcttgcgtatcttgttgtgtgccgtgcatttcagtcagcatgatgccgaacttaacgccaccggcgtaatccatctgcgcgctaataatgttgttgttgacgttgaaacgacgcgcggtttcagaaagcagtggggcatcgaccgattgaccggtaaactccagacgcagcatcggcacgcagtcagtaaatggctccgcttgcagacgttcctggtaatcttccgggatatccagatgcagggtcgactgaataaacttctgcgccagcggcgttttcggatgcgagaacacttcacttaccgtgtcctgctcgatcagttcgccattgctgatgaccgccacgcaatcacaaatgcgcttcacaacgtccatttcgtgagtgatcaacagaatcgtcaaacccagacggcggttgatgtctttcagcagttcgagaatagaacgtgtcgttgccgggtccagcgcgctggtggcttcatcacacagcaatactttgggattgctggctaatgcacgggcaatcgccacacgttgtttctgcccaccggaaagattcgacgggtagctatcatgcttatcgccaagaccaaccaatgacagcaattccgtcacgcgacgtttgatctcgtctttcggtgtgttgtccagctccagcggcagagccacgttgccaaaaacagtacgcgaagagagcaggttaaaatgctggaaaatcataccaatctggcgacgagctttggtcaactcggattctgacagcgtggtcagttcctggccatcgaccagcacgctaccctcggttgggcgctccagcaggtttacacaacgtataagcgtactcttacccgcgcctgaggcaccgataacgccataaatttgtccagctggcacatgcaggctgacgttgttcaacgcctggatggtgcgggtgccctggtggaacactttggtgatattcgaaagttttatcattgattatttattatcgtcattaagttagtcgtggcatttcgaatgcctggaacgggcaacgccgtcaatgaaatggatgttaaggcatccagacgtctaaatcaatcaggtttatgcgaagagcactttcttgcaggtcgaaacatgcgatactagcgtcacatgccttattaaggagctataaaaggtggcgaagagcgtacccgcaatttttcttgaccgtgatggcaccattaatgttgatcacggctatgtccatgagatcgacaactttgaatttatcgacggtgttattgacgccatgcgcgagctaaaaaaaatgggctttgcgctggtggtagtaaccaaccagtctggcattgctcgcggtaaatttactgaagcacagtttgaaacgctgaccgagtggatggactggtcgcttgcggaccgcgatgtcgatctggatggcatctattattgcccgcatcatccgcagggtagtgttgaagagtttcgccaggtctgcgactgccgcaaaccacatccggggatgtttttgtcagcacgcgattatttgcatattgatatggccgcttcttatatggtgggcgataaattagaagatatgcaggcagcggctgcggcgagcgtgggaacgaaagtgctggtgcgtacgggtaaacctattacgcctgaagcagaaaacgcggcggattgggtgttaaatagtctggcagacctgccgcaagcgataaaaaagcagcaaaaaccggcgtgatgattaaaagatgagcggttgaaataaaaatgcatttttccgcttgtcttcctgaaacgactccctataatgcgcctccatcgacacggcggatgtgaatcacttcacacaaacagccggttcggttgaagagaaaaatcctgaaattcagggttgactctgaaagaggaaagcgtaatatacgccacctcgcgacagtgagctgaaagccgcgtcgcaactgctctttaacaatttatcagacaatctgtgtgggcactcgaagatacggattcttgacgtcgcaagacgaaaaatgaataccaagtctcaggagtgaacacgtaattcattacgaagtttaattctttgagcatcaaacttttaaattgaagagtttgatcatggctcagattgaacgctggcggcaggcctaacacatgcaagtcgaacggtaacaggaatcagcttgctgatttgctgacgagtggcggacgggtgagtaatgtctgggaaactgcctgatggagggggataactactggaaacggtagctaataccgcataacgtcgcaagaccaaagagggggaccttcgggcctcttgccatcggatgtgcccagatgggattagctagtaggtggggtaaaggctcacctaggcgacgatccctagctggtctgagaggatgaccagccacactggaactgagacacggtccagactcctacgggaggcagcagtggggaatattgcacaatgggcgcaagcctgatgcagccatgccgcgtgtatgaagaaggccttcgggttgtaaagtactttcagcggggaggaagggagtaaagttaatacctttgctcattgacgttacccgcagaagaagcaccggctaactccgtgccagcagccgcggtaatacggagggtgcaagcgttaatcggaattactgggcgtaaagcgcacgcaggcggtttgttaagtcagatgtgaaatccccgggctcaacctgggaactgcatctgatactggcaagcttgagtctcgtagaggggggtagaattccaggtgtagcggtgaaatgcgtagagatctggaggaataccggtggcgaaggcggccccctggacgaagactgacgctcaggtgcgaaagcgtggggagcaaacaggattagataccctggtagtccacgccgtaaacgatgtcgacttggaggttgtgcccttgaggcgtggcttccggagctaacgcgttaagtcgaccgcctggggagtacggccgcaaggttaaaactcaaatgaattgacgggggcccgcacaagcggtggagcatgtggtttaattcgatgcaacgcgaagaaccttacctggtcttgacatccacagagtgagacaggtgctgcatggctgtcgtcagctcgtgttgtgaaatgttgggttaagtcccgcaacgagcgcaacccttatcctttgttgccagcggtccggccgggaactcaaaggagactgccagtgataaactggaggaaggtggggatgacgtcaagtcatcatggcccttacgaccagggctacacacgtgctacaatggcgcatacaaagagaagcgatctcgcgagagcaagcggacctcataaagtgcgtcgtagtccggattggagtctgcaactcgactccatgaagtcggaatcgctagtaatcgtggatcagaatgccacggtgaatacgttcccgggccttgtacacaccgcccgtcacaccatgggagtgggttgcaaaagaagtaggtagcttaaccttcgggagggcgcttaccactttgtgattcatgactggggtgaagtcgtaacaaggtaaccgtaggggaacctgcggttggatcacctccttaccttaaagaagcgtactttgcagtgctcacacagattgtctgatagaaagtgaaaagcaaggcgtcttgcgaagcagactgacacgtccccttcgtctagaggcccaggacacctgccctttcacggcggtaacaggggttcgaatcccctaggggacgccacttgctggtttgtgagtgaaatcagctgggagagcgcctgctttgcacgcaggaggtctgcggttcgatcccgcatagctccaccatctctgtagtgattaaataaaaaatacttcagagtgtacctgcaaaggttcactgcgaagttttgctctttaaaaatctggatcaagctgaaaattgaaacactgaacaacgagagttgttcgtgagtctctcaaattttcgcaacacgatgatgaatcgcaagaaacatcttcgggttgtgaggttaagcgactaagcgtacacggtggatgccctggcagtcagaggcgatgaaggacgtgctaatctgcgataagcgtcggtgaggtgatatgaaccgttataaccggcgatttccgaatggggaaacccagtgtgtttcgacacactatcattaactgaatccataggttaatgaggcgaaccgggggaactgaaacatctaagtaccccgaggaaaagaaatcaaccgagattcccccagtagcggcgagcgaacggggaggagcccagagcctgaatcagtgtgtgtgttagtggaagcgtctggaaaggcgtgcgatacagggtgacagccccgtacacaaaaatgcacatgctgtgagctcgatgagtagggcgggacacgtggtatcctgtctgaatatggggggaccatcctccaaggctaaatactcctgactgaccgatagtgaaccagtaccgtgagggaaaggcgaaaagaaccccggcgaggggagtgaaaaagaacctgaaaccgtgtacgtacaagcagtgggagggttaaccgaataggggagccgaagggaaaccgagtcttaactgggcgttaagttgcagggtatagacccgaaacccggtgatctagccatgggcaggttgaaggttgggtaacactaactggaggaccgaaccgactaatgttgaaaaattagcggatgacttgtggctgggggtgaaaggccaatcaaaccgggagatagctggttctccccgaaagctatttaggtagcgcctcgtgaactcatctccgggggtagagcactgtttcggcaagggggtcatcccgacttaccaacccgatgcaaactgcgaataccggagaatgttatcacgggagacacacggcgggtgctaacgtccgtcgngaagagggaaacaacccagaccgccagctaaggtcccaaagtcatggttaagtgggaaacgatgtgggaaggcccagacagccaggatgttggcttagaagcagccatcatttaaagaaagcgtaatagctcactggtcgagtcggcctgcgcggaagatgtaacggggctaaaccatgcaccgaagctgcggcagcgacgcttatgcgttgttgggtaggggagcgttctgtaagcctgtgaaggtggcctgtgagggttgctggaggtatcagaagtgcgaatgctgacataagtaacgataaagcgggtgaaaagcccgctcgccggaagaccaagggttcctgtccaacgttaatcggggcagggtgagtcgacccctaaggcgaggccgaaaggcgtagtcgatgggaaacaggttaatattcctgtacttggtgttactgcgaaggggggacggagaaggctatgttggccgggcgacggttgtcccggtttaagcgtgtaggctggttttccaggcaaatccgtaggtgaagcgacttgctcgtggagctgaaatcagtcgaagataccagctggctgcaactgtttattaaaaacacagcactgtgcaaacacgaaagtggacgtataccttgatcgaagccccggtaaacggcggccgtaactataacggtcctaaggtagcgaaattccttgtcgggtaagttccgacctgcacgaatggcgtaatgatggccaggctgtctccacccgagactcagtgaaattgaactcgctgtgaagatgcagtgtacccgcggcaagacggaaagaccccgtgaacctttactatagcttgacactgaacattgagccttgatgtgtaggataggtgggaggctttgaagtgtggacgccagtctgcatggagccgaccttgaaataccaccctttaatgtttgatgttctaacgttgacccgtaatccgggttgcggacagtgtctggtgggtagtttgactggggcggtctcctcctaaagagtaacggaggagcacgaaggttggctaatcctggtcggacatcaggaggttagtgcaatggcataagccagcttgactgcgagcgtgacggcgcgagcaggtgcgaaagcaggtcatagtgatccggtggttctgaatggaagggccatcgctcaacggataaaaggtactccggggataacaggctgataccgcccaagagttcatatcgacggcggtgtttggcacctcgatgtcggctcatcacatcctggggctgaagtaggtcccaagggtatggctgttcgccatttaaagtggtacgcgagctgggtttagaacgtcgtgagacagttcggtccctatctgccgtgggcgctggagaactgaggggggctgctcctagtacgagaggaccggagtggacgcatcactggtgttcgggttgtcatgccaatggcactgcccggtagctaaatgcggaagagataagtgctgaaagcatctaagcacgaaacttgccccgagatgagttctccctgactccttgagggtcctgaaggaacgttgaagacgacgacgttgataggccgggtgtgtaagcgcagcgatgcgttgagctaaccggtactaatgaaccgtgaggcttaaccttacaacgccgaagatgttttggcggatgagagaagattttcagcctgatacagattagattaaccggcgacaagcgggttaatggaacagaatttgcctggcggccttagcgcggtggtcccacctgaccccatgccgaactcagaagtgaaacgccgtagcgccgatggtagtgtggggtctccccatgcgagagtagggaactgccaggcatcaaatttagcagtaagctggtcataaaaccggtggttgtaaaagaattcggtggagcggtagttcagtcggttagaatacctgcctgtcacgcagggggtcgcgggttcgagtcccgtccgttccgccacttattaagaagcctcgagttaacgctcgaggttttttttcgtttgtatttctattattgccaaaatcgcaaaaatcctctgcgttttacgccatttttccacaacagtctgaagcccataatcacctcagttaacgaaaatagcattaaaagaggcatattatggctatccctgcatttggtttaggcactttccgtctgaaagacgacgttgttatttcatctgtgaaaacggcgcttgaacttgattatcgcgcaattgataccgcacaaatctatgataacgaagccgcagtaggtcaggcgattgcagaaagtggcgtgccacgtcatgaactctacatcaccactaaaatctggattgaaaatctcagcaaagacaaattgatcccgagtctgaaagagagcctgcaaaaattgcgtaccgattatgttgatctgacgctaatccactggccgtcaccaagcgatgaagtctctgctgaagagtttatgcaggcgctgctggaagccaaaaaacaagggctgacgcgtgagatcggtatttccaacttcacgatcccattgatggaaaaagcgattgctgctgttggcgctgaaaacatcgctactaaccagattgaactctctccttatctgcaaaaccgtaaagtggtcgcctgggctaaacagcacggtatccatattacttcctatatgactctggcgtatggcaatgcactgaaagataaggttattgctcgtattgcagctaaacacaatgcgactccggctcaagtgattctggcgtgggctatgggggaaggttactcagtaattccttcttctactaaacgtgaaaacctggagagtaatcttaaggcacaaaatttacagcttgatgccgaagataaaaaagcgatcgccgcactggattgcaacgaccgcctggttagcccggaaggtctggctcctgaatgggattaagcctctctgacagctcctccgggagctgtttttacatgctcgctaaggaaatcgataaaagcccggatgcgcgtacttaccgcacggtcgctgtaatagactgcactgaatggcatttccactggcaacactttatctgccattaactccaccaattctccgcgagcgatttctttgtcgatcatgtagtcggacaaacacgcaatcccgttgccactcaggcaaagctgtttcagtgtttccccactattggatgacaaaccgtacttcacctcatgtaattgtccatcgctacaggctatcggccaggtattgagggaagcgggttcagtgaatctcaggcaaatatgttgctttaaatcgtcgatcgtttctggcttcccgtagcaggaaatataatcgggggaggcgataatttttcgataactgttaaataacggcctggcacgtaagctggaatccgttaacgtaccggcgcgtatcgcgacatccacttttctttcgatcaaattaataatcgtttcggaggagactagcgataaagtgacttccggatagcgttcacgaaaaggcttaatcaacggcatcagaaagtgcagcaccactggagttgcggcatcgatccgtaacagtccacgcggtgtattacgcgtctccataatttctgattctgccgctgccatctcctgcaaaattgactgtacgcgacgaaaataacgctcgccttcttccgtcaggctaagttgccgcgtggtccgattaagcaggctaacgccaagtttcatctccagctttttcaccgcccggcttaccgctgagtttgcttgccctaattgttccgctgcccggctaaagctgccgctttcgacgactgaaacaaaaatggcgagttcttccgacgtggctttcatttttgctcctgttgcaaaatagaagagatattttgaatttatttgtcattaaaccatcaggatgcgagatatgccatccgatttaatgttctcaataatgagcaaaatcctgaccggtgtaagcacttgcttacataacaatatacaattgctcgttgaaagagtgagctaaaatccctataacagtagaaccctcccgagtgcggaagggttgacgtgatagaggtttcaaagtcaaaagtgcgaaaaaacacctatgccatgcgctatgttgccggacaacctgcggaaaggatcttaccgccggggtcttttgcgagcatcggccaggcattaccacctggagaaccgttaagtaccgaagagcgtattcggatcctggtgtggaacatatacaaacagcaacgcgctgaatggttgtcggtattaaagaactacggcaaagatgcacatctggtgttattgcaggaagcgcagacaacgccagagttagtacagtttgcgaccgctaactatcttgccgccgatcaggtacccgctttcgtactgccacaacatccttctggcgtaatgaccctttcggcggcgcatccagtgtattgctgcccgttacgtgaacgagaacccattttgcgtctggcgaagtcggccctggtgacggtctatcccttacctgacactcgcctgttgatggtggttaatatacacgccgtcaatttcagtctgggcgtggatgtctatagtaagcagttacttcctattggcgatcagatagctcaccacagcggcccggtcattatggcgggagatttcaatgcctggagccgtagaaggatgaacgcgttatatcgctttgcgcgggaaatgtcgctgcgccaggtgcgttttactgatgatcagcgccgtcgggcgtttggccgcccgctcgattttgttttctaccgtggtctgaacgtcagcgaagcttctgtactggttacgcgcgcttccgatcacaatccgctactcgttgaattcagtcccggcaagcctgataaataaggtatgtcaggtctgccacagggcagaccaacgtttggcgctgcccttttatactcaaataacaaaaggacagcgcaatgacaacacaatcccaccatgaccacgtagaaaagcagtttagctctcaagccagcgaatatctgaccagtaccgtacatgcatccggacgagatttacagcgcctggcggtgcgtctggctgattatcctgatgcaagtgtacttgatatgggctgcggagcagggcatgccagctttgtcgctgcgcaaaacgtgagcacggtggtggcgtatgacttatctgcccatatgctggatgtcgtggcacaagctgccgaagcccggcaactgaaaaatatcaccacccgccagggttatgtcgaaagcctgccatttgccgataacgcatttgatattgttatcagccgttattctgcccatcactggcatgatgttggtgcagcactgcgtgaagtgaaccggatattgaaacttggcggtaagctgattgtgatggacgtaatgtctccgggccacccagtgcgcgacatctggttacagacggtagaagcattacgcgatatatctcacacacggaactacgccagcggtgagtggttgacgttaatcagtgaagccaatctgatagttgataatttaattacagataagttaccgctggaattttcttcatgggtagcgagaatgcgtacgccagaagcgttagtagacgctattcgcatttaccaacagagcgcatcgacagaggtgaaaacgtattttgccttgcagaatgatggctctttcaccagtgatatcatcatgctagaagcacataaagcggcataaataaaaaaggcaccgggggaatcggtgccttttttattatctggtttgtcaggaatctggcatgttgttgtttttcacaaacaacgtcagcttatcgcctggttgcagattcgcagtgtcgctgttccagcgcattacatctttgatgttcacgccgtggcgtttagcaatgcttgaaagcgaatcgcctttgcgcacacgatacgtaatgctatcgctgttgtttgccagtcgctgtgcgctactgcctgcaccaatcgtcaaactttggcctggcttcagcttagatccgcgcagtttgttccactgctgcaaatctttggtgcttacgccgagacgtgaagcgatacttgaaagcgtgtcgccagagcgtacggtgtaaacacggctgttaagcggcgtattgtcggcaaccagcgtcgactgtacagcagcaatttcgcctgaagccagagattcacgcagttgatctgcatgcttctttggcaccatcacgtactgcggaccacttgcgcccagcgtggagcctttcacgcctgcgttgaatgtcttcagcttgctgacggaaatccccgccatatctgcaaccttcgccatttcaaccgggctgctcaggtgcacacgcgccagagcacggctttcatcggtcgttggcagacgtacgccataacgcttgctgtttttgagaatatcactcaatgccagcattttaggcacgtactgcttcgtttcctgcggcaacggtaacgaccagaagtccgtggatttcccacgcgctttgttcgttttaattgccttcatgacccgaccttcgccgctgttataagccgctacggtcagaagccagtcgccgtcaaacatcttgttcagacgctgcatcatgttcagcgcggcagttgttgaagcaacaacatcgcgacgcgcgtcataattgcgtgtctgtttcaaaccataattgcgccccgtgctcggaatgatctgccagatgcccgcggcattggcgccagacgttgcgtgaggatcaaaagcgctctccactatgggtagtagtaccagttccataggcatgttacgttttttaacttgcccggctatccagtacatatacggctctgcccgtaaagttacatcgtggagatagctcttattgcgtaaatatttctgtttctgttcgcgaatccggtcgttttccggaattcccatctttagctcgtcgccaatgaaagcccacaagtcaccatctggcgcgatagacgtcccatcgtccatccatcgtgcctgacttgtaaactttgctgcttccccttgaccagctgcagaaaggctctgtgcgtgctgttgaacgttgccggtactctggcaacccacgagcaggacagaggcgagtaatatcgcttttgccttcatgtgtgtgtcaatagttgcttaaaagacgaccgatcataacggcgaacggagccgatgacaagaaagttttatcagaacctatctttctttgaccttaaccatgcaaaacgttcttcaggttgttgcaataatgtttcttcattaattacattaattaaatcaatatcttccgttcttaaaaaaacattaatttgccgctcatttttcagaattacgggtagtgttatttgattttttgcccgtaactccttaactttacgataataatcatttatggacaaatcgtgcggaagaatactcaaagcaaacttcatatttgataaggtatattcatgagcacaacataccaatgtatcgtcaggtaacgcacttaactttttaagtgattgatacatttgtgatggtgtcccttcaaacaaccgaccacacccaccagaaaacagcgtgtcgccgcaaaatagataaggtttactgaagtaacagatatgtcctaaagtgtgacccggtgtggcaattacactaaattcatgccccaaaacgaaggcagtttcgctatctttgactacctgtgttgttcccttatcttgtgtctcttgtggaccatacaccacaatttgcggaaactttttcaccagttcttttacgccgccaacgtgatcgtggtgatggtgggtgagaaatatggcctccggttgccagttattggcggcaatggcgtttaatactggctctgcgtctccgggatcgacaatcaggcagcgacctgcttcatcattcaaaacccagatgtaattgtcatcaaaggcgggaatactgttaagattcatagattacctctcagtgtgaaacggaaggttgtgatgaaaccggcaagagtccctcaaactgtcgtggctcctgattgctggggcgatttgccctggggagagctttatcgcaaggcgctggagcgtcagctcaacccgtggttcactaaaatgtatggttttcatctgcttaagattggcaatttaagcgcagaaatcaattgcgaagcgtgcgcggtttctcatcaagtgaatgtttctgcgcaaggaatgcccgtccaggtgcaggcggatccacttcatcttccttttgccgataaatccgttgatgtttgtctactggcacatacattgccgtggtgcactgatccgcatcgtttattgcgtgaagccgatcgggtactgattgatgatggctggctggtgattagtggcttcaatcccatcagtttaatgggattacgcaaacttgtgccggtattgcgcaaaacatcgccctataacagccggatgttcactctgatgcggcagctggactggctctctttgttgaattttgaagtgctacacgccagccgtttccacgttcttccgtggaacaaacacggaggaaaactattgaatgcgcatattcctgcgcttggttgcttacaacttattgttgcccggaaacggactattcctttaacgctaaatccgatgaaacagagcaagaataaaccgcgaattcgccaggcggttggtgccacccggcaatgtcgtaaaccacaggcttaaacttcgacttgatagcctgtatcttccagtgtgggattcattgccgcagcacgagccagttcatcacagcgttcgttttccgggtgtccggcatggcctttaacccattcccatttgatttgatgctgccccagagcagcatcaagacgttgccagagatcgacattttttactggttttttgtctgctgttttccagccacgttttttccagttatggatccacttggtgataccctggcggacatactggctgtcggtactcaaaatgacttcgcaatgttcttttaacgcctccagcgcgacaatagcggccatcaactccatacggttgttggtggtgcgggtgtagccagcgctaaaggttttctcgcgtccgcgatagcgtaaaatagcgccgtaacccccaggtcctggattacccagacacgaaccatcggtgaaaatttctacctgtttaagcatctctggtagacttcctgtaattgaatcgaactgtaaaacgacaagtctgacataaatgaccgctatgagcactgcaattacacgccagatcgttctcgataccgaaaccaccggtatgaaccagattggtgcgcactatgaaggccacaagatcattgagattggtgccgttgaagtggtgaaccgtcgcctgacgggcaataacttccatgtttatctcaaacccgatcggctggtggatccggaagcctttggcgtacatggtattgccgatgaatttttgctcgataagcccacgtttgccgaggtagccgatgagttcatggattatatccgcggcgcggagttggtgatccataacgcagcgtttgatatcggctttatggactacgagttttcgttgcttaagcgcgatattccgaagaccaataccttctgtaaggtcaccgatagccttgcggtggcgaggaaaatgtttcccggtaaacgcaacagcctcgatgcgttatgtgcccgctacgaaatagataacagtaaacgaacgctgcatggggcattactcgatgcccagatccttgcggaagtttatctggcgatgaccggtggtcaaacgtcgatggcttttgcgatggaaggagagacacaacagcaacaaggtgaaacaacaattcagcgcattgtgcgtcaggcaagtaagttacgcgttgtttttgcgacagatgaagagcttgcagcacatgaagcccgtctcgatctggtgcagaagaagggcggaagctgcctctggcgggcataaatacctgtaaaaggcgctaaaaatagcgacttgggcgatttttgcagcaaacgattcaaaagatgagaaaaaccgttgacgaagggtgaggcaatccgtaatattcgcctcgttcccaacggaacacaacgcggagcggtagttcagtcggttagaatacctgcctgtcacgcagggggtcgcgggttcgagtcccgtccgttccgccactattcgaggccatgctgttgattagcatggccttttatatgcttgttttttcggtatgccatccagtatgccattgccgtccggcttgcactggctcacctgaaatagcttcagacaactcactcacctctcatctcgctggcagtgctcccggattggtgtcgggcgatgatgttgttcagcttatcaatcagctcaggtcgcttgaatacgatttgtgcagttcccttctgaaaatacttaatcacaaacatctcatcctcatagtggttgctgtgccggttttcatgaatatggtctcccagccgacgggtaacgtcagcgcggttgtcgggaacaggcttcccgtcaaggatcatcagcattcgctcaaggtctgctaaccggtcacgctgtcagccatggttaagcccgaatccccaccggtcgaatttgaccagtcccgtcacaatgattttcgctccaaacccgcagggcgaattcgtcttaaaattccagcttaatcctttgaaaacgttaatgacgccacgctaaaacacctcacccttgttcaaatgcagttgcttaaaggtgctcagaatattcgcttcgctgaccaccggaatatcatccttttctaggctgttgtaccactggttacgggcctgagcgtccataatcgacagcatccctgagcgtttcattaaatcccgccatttaccgcgatcgagattgcgggtaatggctttcatcgctgtttcaggcttctccataagccagcaaccacagcgaaaatcctgtttcatgacccagtccagggcggtttttccgccgatactgagggtttgtgtcgaaatatcgttaatctggtggagcaatgcttcaatctgtgtcagcgccgcattacgtccggtgacgatgcgttcaatactggtggagcaaatcacatcggtatgatcggttaatacttcggggttggtgagagtaggttctgacattatttatttcctttatacaaagcaaagcgccagccggtgggggctggcacgtgtatgtgtgtaatgagtacggacagggagttaatctgtacgggtcttttgcagacgttgaaactgacacagctcgcgaacgtcctgacatgcacgttcaatccagggaaacagtactgccgaatctgttttatcctcatcgttgtcaaagataattcccgattcgcagtcgatattgttcgtaagcgtaaagccaatgccgtctgtaactcctgatccttgcagactaaattagagctccttctaaattagacggagttctattgatggataaacctacagactggcgctctgggacgcgccggatattttctaatgaatttaagcttcatatggttgaactggcttcgaaaccaaatgccaatgttgcacaactggcccgggaacatggcgttgataacaacctgatttttaaatggctacgtctctggcaaagagaaggacgtatttctcgtagaatgcctccaactattccattacggtaaaatgacactgggaaatccttcaccagagctgctcacggtgttgatccgtgaactgaccgggaggggaagatgatctcactcccatcaggtacccgcatctggctcgtggccggcgttaccgatatgcgtaaatccttcaacggtctgggagaacaggtacaacatgtgctggatgagacccccttctcaggtcacctgtttatctttcgtggccgacggggtgacactgttaaaatactctgggccgatgctgatggtctgtgcctgttcaccaaacgcctggaggaaggccagtttatctggcctgcggtgcgtgacggtaaggtatccattacccgctcgcaactggcaatgctcctcgataagctggactggcgtcagccaaaaacattccgccttaactcactgacaatgttgtaaaaaatgcctggccgcattataaaaacggccatgagtcagaaatacctcattcgcattgcagaactggaaagccagctccgtcagaaagaccagcaactgagtctggttgaagagacgaagaccttcctgcgctctgcactggcacgtgccgaagaaaagatcgaagaagatgaacgggaaatagaacatctgcgggctcagatagaaaaactgcgccggatgctgttcggtacctgttctgaaaaactgcgtcgtgaagttgaacaggctgaggccctgctgaaacaacgcgaacaggacagcgatcgttacagtgggcgggaagacgatccacaggttccccgccagttgcggcagtcgcgccatcgtcgtccgttcccggcacaccttccccgtgaaatacaccgtctggagtctgaagaaagctgttgcccggagtgtggcggtgagctggattatctgggggaagtcagtgcagaacaactggaactggtgagcagcgctctgaaagtgatccgcacagaacgggtaaaaaaagcctgtacaaaatgtgactgcatcgttgaagcaccggcgccgtcccgccgcgatagagcgtggtatcgcgggccccggattacttgcccgcgtgtttacgggaaaatactgcgaacacctgccactgtatcgtcagagtgaaatctttgcccgacagggtgtcgaactgagccgtgcattactctccaactgggttgacgcgtgctgccagttaatgacgccgctgaatgatgccctgtatcgttatgtgatgaatacccgcaagcttcacactgacgacacaccggtaaaggtactggcaccgggcctgaaaaagacgaaaacagggcgcatctggacgtatgtccgggatgatcgcaatgcgggttcgtcatctcctccggcggtctggttcgcgtactcaccgaacaggcaggggaaacacccggagcaacacctccgccccttccggggtatcctgcaggcggatgcgttcacaggttacgacaggctgttcagtgcagaacgcgaaggtggtgcgctgacagaagttgcgtgctgtgctcatgcccggagaaaaatccacgatgtatacatcagcagcaaaagtgcgatggcagaagaagccctgaagcgaatcagtgaactgtacgccatcgaggatgaaatacggggattaccagagtcagagcgtcttgcagtcaggcagcagcgaagcaaagcgttactgacgtcgctgcatgaatggatggtggagaagaatggcacgctgtcgaaaaaatccagactgggcgaagcgttcagctatgtactgaatcagtgggacgccctctgttattaccgtgatgacggtctggcggaggcggacaataacacagcggaaagagcgcttcgtgcagtctgtctcggaaagaaaaattcttatgacctttgtcaaatattaagcccaaaaagaccttacgcagctccgggagcttcgttatatcgcggattaaagaacctgaaacagtcagactgtatcttggattttacaaactcttattcggggattttagccccatgacgatttacgcagtgagctggcctctttctacgtgcaggtattagcgcattctggcttccctgaattcttttacgaggatcactcattccgtgtctgactgcttcagggtttaattttgcttctgctgactgaatgatgattgggcagcaagtgcaatatcccacataaatccagtcaactcacgagccaccgccgtaatggctacttgtgattttttcccttttgctgtcagacttcggtaacgagaacacaatcgttgttgagctttccatgcaatatctttggaatattgtgttacagagtccggtcggtaatatataagccatgccccaacttttgcaggtgtacgataagaccaggcggcttcgtaaagcagacgtctcagttcgctgtttccaacttttgttattcctctgggacgaatactgtttccactggaatattcacctggcaccagtcccagaaaagccatgagctgtttgggattggaaaatcgcgaaaaatcacccagttcagcaaccagagttattgcaattagctgaccaacacctttaagagcctgcaactggcagaccagattgcacagagaccactcaggtaacaggcgagatatttcctggtcgagttgaagtatgcgatcttcaatctgctccagactttgacaatagtgttgaaaagcaatctgttgagatggctgactaaatgattgattagctaaccaggttcgatgttttcctgtccagtgctttcctgcataatgtttgtctgttcgcaatagcatgctcagaattcgctgtcgggcaactctgctgtctcgtttagctgctgcacgggctctgattagatcccgcatagcttcatgagtcaggtcagggatccagacaggggtaagttctccagcccgcagtaacctggcgagagaaattgcgtcccgatgatcatttttgattctgtctgtcggtgattttggtatgcgggaaggggcaataacctggcattttatattcatcgctgtgagttgatgatatagcccaaaaccacaggggccagcctcatagcaggaaagaatgtttccgtaaagtccctgcaatttctgaaataatcgacgtacagcctgggcttcgttgttaatcgtaccataataacgaacttcgccaagccgttcaggtgcagcaatagcaaccgccaacgtttctttatgcacatccagcccgacgtaagccgcaatattttccgaatgcatgatgacctcctctggaatatcccaccaatgctatagtgagtatataaaggtcatatcatctacgtgttcttcggtagcgatcacggcggcgagcgtggagcactgctgtacgggctgatcggcacctgccgtctgaacggtatcgatccggaagcgtatctgcgccatattctacgtgttcttcggtagcgatcacggcggcgagcgtggagcactgctgtacgggctgatcggcacctgccgtctgaacggtatcgatccggaagcgtatctgcgccatattctgagcgtactgccggaatggccctccaaccgtgttgacgaactcctgccatggaacgtagttctcaccaataaataagcgtcaatacggtgctccgttgacgcttactattgttctgcagctaaatagctgcgcggaatagtagatcactttgagggaactcagcccggattgtgcgatctgatcaatcgccaaatcaaaacaaatcaccaaccggactgagcaatgccgatcatagcaccaatttcccgtgacgaacgacgcctgatgcagaaagccatccataaaacacacgataaaaattatgcccgcagactgactgccatgctgatgctgcaccggggcgaccgtgtcagcgacgttgccagaacgctctgctgcgcccgttcctctgttggacgctggattaactggttcacgcagtcgggtgttgagggactgaaatcattacctgccgggcgtgcccgtcgctggccgtttgagcatatctgcacactgttacgtgagctggtaaaacattctcccggcgactttggctaccagcgttcacgctggagtacagaactgctggcaataaaaatcaatgagataaccggttgccagttaaatgccggaaccgttcgccgctggttgccgtctgcggggattgtgtggcgaagggctgcgccaactctgcgtatccgtgacccgcataaagatgaaaagatggcagcaatccataaagcactggacgaatgctgcgcagagcatccggtcttttatgaagatgaagtggatatccatcttaatcccaaaatcggtgcggactggcaactgcgcggacagcaaaaacgggtggtcacgccgggacaggtaaagccagctatgtgggcggcaacagcaaaagttcggcgctgttcatcagcctgctgaaacggcttaaagcgacataccgtcgggcgaaaaccatcacgctgatcgtggacaactacattatccacaaaagccgggaaacacagagctggctgaaggagaacccgaagttcagggtcatttatcagccggtttactcgccatgggtgaatcatgttgaacggctatggcaggcacttcacgacacaataacgcgtaatcatcagtgccgctcaatgtggcaactgttgaaaaaagttcgccattttatggaaaccgttagcccattccccggaggcaaacatgggctggcaaaagtgtagcggtattaagcgcagctatttaggcaatcagaatttccagcgccgtttccgtgattaatgatgtcatgtcgttcctagttaccagtcgaaagtgggcaggcccggcagacatcctgcactggcagccagatgaatgagaccgacgccataacaccggatgagagtgacaaccagacgacggaacgtttttgacaggccaagacgtttaagccgcagaaccggatacgaccacgcatcagtacgtaacagataaccggtacctgtaaaatgaatccattctgattcgccgaagtcattcgtctgatgtgacagtgagtacagccaggcgttgtccttttccgtgatatgtgcggtactgcaacgaacgtatgtcggtaagggcagtaaacggtggtggagagtcggttgtctgctgttcgggagcatccaccacgcggagtgaataaccgttttcagcgaccttattattcaactcagcggggtcaataccatcgacgtcaacgacaattcgccccatgttcagtgcctgcacgttaacgctgtctgcttcgagcgtcagagtcagtagagtcagtttcatcgtttcgcctccgatagagtcagtttcatcgtttcgcctccgaatgttcaccccggatgatgtcgttcaccattctgtagttgctgcgggtcatcaggccggttgcccggcgggcccggaggatatcaatactgtttattaactgagaacgggtacaagcgctgaatcctggctggtcggtacgtaccagtgcgtatttttcaacgagaaagttcaccgcatcgcacagtgaaatgcctgcctcaatatgctgctcaatcacacgttcatcagcgaacggtgtgtcattcagtgtgaggccgtaatgctggtccaacagttgggtgagcagtgtctgccagatggtgacgggagacgggcagcgcgatgcctcccgtacgtgtgtgtcaggtaatgttttcatcttaagttctctgtaactggtagtgctaaaggtgagatattcggggttatgaggtggttgcgggtgccagtgtcggataaacagccatataaacgtaaccacagctgccgagggtgtcggcttcgcaggtcagccctctggcatacagcgtgacggtatgctgatggcggggattcagttcaccgatggtgagcatgagttccagttgtttcatcagcagtggaaaagcctggtccagatggtatgcatccgcgtcgctgaactgccctctgataccggcgcggtcggcaaggtaatgcaactgattgccctcctgcaccagacgtgccccgaaacagggcgtcacggtgcagggtagcccccaccaggggcggtcgttgttgtcgtcgggataatttgtttcatggagcgtgtctgacacgataaagtcctcacagaaaatcggtgaatgatagtttaacgatgacaggtcagccggcgtggagaccggcttcggtgaaggtatatgcattgatgtgaatggcctcatctacagcggcgtctgaggtcagccagtcgtactcgttttccagctggcggtacagccagaaggccaggtcgcgcagggcttcgctgacagcggcttccgcatcggctgtcagtgcctgaccagtcggactgttccgggtgacggtgatatccatgctgtacggatggcagtaacgtccccggtgactgatttcagcctgtaactgccagaagttacgcttctgtaccgcctgcagggcatccgcgatacgatgaagctcacggtcctgaggggcatattccctgattttccggggtgtcgctggctgccagtgccagcgcccttcaaaacaggctccgtccccctggctgcagaatccgctgaaccagatgcacggctcttccataaacctgccgttgctgagccggaaaacgcgctggcggaggtcaattccgaaaatgccacagacctccctgaagtcctcatacacgttttcataccagttgctgtcagcatgatgctgacggtaccagtcgcgggctttttcctgtgcggtggaggatagctcatgcagtgtatacacggtggtggtgataattctgctcatcagaatgcccttactgactcagttcagagtgacgctcatcagccggacatacgggccaaaactgtccttacggcgttctgcaaacacggccagcacaccgggaatatcctgcacttcacgaccggtatacgtttcagtgctgccgtgccagcggtatttgccggtacagaacggaaaaagacgggatgcaggatgctgttggtgaatacgcatggcttcgccacgggtgatgattttcatagtgggatacctctgaagacagaagataaaagtgaaaacaggtgtgatgtggttgtgacgggttaaagcagaccatattcggcaaaggagaaaacctggctgccaccgactatcagatggtccggcacccggatatccaccaggcccagtgcctgtaccagacgttccgtgataagccggtctgccttgctgggtgtgacttcaccggacgggtgattatgtgccagcaccacggctgcggcattgtgatacagggcgcgtttaatcacttcccggggatggacttccgtgcggttgatggtgccggtgaagagggtttcaccggcaatcagctgattctggttattcagatacagcacccggaactcttcacgctccagtcccgccatgttcagaatcagccattcccgtgccgcacgggtggaggtgaaggccacgccgggttcatgaagatggcggtccagggttttcagggcccgcagaatgaggctgcgctctctggttgtcatttctccgggcagaaaggaaagctgctgcattgtccctgcctccattcagtcgatgatgcgcataatggcgctgcattccggatgctgcagggcgtaatcccgcagacggtaataatgaaccgtcatggcataacactccgtacggcaggcgtgatgactgtacgtcatcagacaggcggcaatgccggcggcttccgggctcatttcagcgcggttaccgttcatggcattgaacagtacccatgtttcgtcatcatcgtcatccggttcaggggccataaatgccccgccgttgttcagggtgtacagattccagataccaccgcagtagttttcgcacagacggtccatccagccgaagacacggggctccagggtcacccactgtggaatgaggccaaaatgctgcggccagaagctgatgcgctgttcatcagggactatggtggcaaccagttgttgcaggccagtctccggtgcacaggccgaagaggtggtgttctgagacaatgttttcatgtatgaaatccttgtaatgtgaataaatgagagggagtaaaggtcgggagctggcaacatcacgttcatcactgaccgtgagacccggtaatatcagggatgaatgatattcggctgaaattccggacagccgtacgcgtaaccgttccggtcacagacggatggccagatgccattgcctgtactcagtctgcacagactgatttctccgggacggtaaagcagacgggtacaccaggcgcacaggtcatcatcagaaatggaacgacaccccggcagcgcctccggggcgtcgggtgattctggtgcctgaatcacgccttcagggacatgctgcatcagcgctggctctccagcagcgtttctgccattacccacaatgcgcggttgagcttaatatcggtgtcgatgctgtgaatggcacgggtgtggatacgttttccttttgcactgcgaccggaaatcccgcctttcagcatattctcctggatggtctgataagtactccacaggtccttaccgtaatcctcccggcgtcgtggcgtcagaatgtcggcggtggtgacgggccgatgttcgtcaccataacggtaagtcagtgccgcctgtgccagcgcctggcgtgccggtggcggcagaatcagcgactgcatggcatcacgcatctcctctatccggtcaaacacgcccaccacctcgtaagccccttcaatgactctgtccaccacatttccccggtgcggaacacgcacttcccccggagactgaccacagacgcatccgttctggcagacgaacctgaagtaacccggcagcatctggtagctggaggtaccgtcatgagagttgagcagaataatttcagggacatgttctccgtttatctctccgttacggcgcaggcgcagcatgtgttttgtgtatccccggcggcccgggtcgcgcacacaggtctggcaggcgaagaatggctgaaagccttcccgctgcaggctttccagtacggtgatggtggggatgtacgtatagttctggcttcgggacgtgtgtttctcttccccgaaaatccccggcacatggtgcatcagctcttcatgtgtcagtggacggtcacggcgtatctggttcgcagcataaccaaaacaactggctaatcgcatactttgctccttatcggtggttaagatttactggtgtaataaatgaaaaagccacgtctcccggagaagacgcagcctgatgggtgaaatgaatgacgtttattgtcttagaggaccgtcactggcgagccgcgtattaagcacctttccggcatcgggttcagaattccggcagcgccagcgtcgctgaccttccgcgttgcggataacccaacggaaatgcattcccgggtcatcctggataaacacattgcggtaagctgttatgacagcaacctcctgttcgcgtaagaaaggggcttcggaaaataagagtaatgtacagcccctcatgtgttttcacctgaaaataaaaagccccagccataatggcaggagcgaatttactattgattttaataatgcgcagataagacgcataattcctttaatagttttgttcgttatggattattcgagtggatagtcgcgatagtgccagtatttaccatcaacataaaaggtcaccttaccgcgacgtttaccctccctataaaacgtatcgaaattccaggtaacattcttgccagttgaatagctgccaccaacgacaacatcaccaaccattattgcatgaacaaccacgccataagcgttaagtctgcctttaccattgggggaattgaaagggattcggacaacgcttgctgcaccccaggggtcagtttgttcaacaaagcagagacctttaaagcgtaaacgtgcattacatgggaactggttacggttttgcgcgaactccacatattccgggaacggtgcacgacctttctcaggacgctttactaatgcggcgtcgctatcaggtacgatagtcatgaacaggaaagcaacaaagaacgttaaaatgtgtcggtgtttcatgataaaaatccttcttaaattattcgataccacggcttacggaatacgaccgattaattcggcgttatggcagaaatccatggtcgtataattatccgcggccagtagatgaatgctggcagacatgacttctggcggttcgcaagcgatgtccattaaacgtggacaggctttggctttttatcgctaataactagcccagtgcaggtatccccctgcatcagtttatacacttcgtgtttactgaagctatatattaacaccggtgactcgtccgggttaataattacagattcttcagttggttcgcagtgacggatatccgaaccaccgagtgcataagtgtcggtgatgccaatttcacagaaaagaatgatagtataaagtatagttttgattttcatttcactcacagttgcgaaaaggttgaatacttacagctccattctggcaagatattgtttgaaatcttcttgcgctttcattagatcacgacgttcggacttattcattctgctgaggatcgcatcattcacacattgcgcaggcaggcggagtaagacatgagtcttatgtttttgtctgatctcttttactttacgatccgattcaccaacaccatgagtatcgagcaccccggttcgaaagaactcgtcaagttcgttactttgcgcaaggtattgagtatcgacaaagacgtagtgacacgagtttttgttctcagcccaatacccgatctgaatatcagaccataaggcgtccttgttgtttagcaagtagaaagtcctggtttcgttgtcagcgacgaaaattatgctgctgtttttactacggtaaatcgtgtatctgttacccggataattcgcaatttcttcggccttatagaggagactgtttaaatattcttttttatacccggtttcgtttttccagcctgctttttctttgtaaaaccatactccctgcggaaaaccggtgatatcctcttcaaactgacccagcgattcggcagtcgcggtgatggaaatgagtaaaccgataaccagaattaaaaaatgtttcatttcatgcactccttaaataaatcgagggccaggaagtccccctctcctgtaatcgttattcgtaccaggtattccagcacgactggataaagttattatccatcactttcttaacgtttttggcagacgggttaaacgtcgcaactttcttctcgtttatgtacagttcaaacccggttgcagtgcttattgcttttacaaagctaacccaggcgttatcgttcatacgggtaccgtcaggaaccacaccccagaattcttcaccgtcaataacgaaactaatatttttttcttccgagtttgcgaccaccttatctcctttgtaaatatagattgtgtgcgccagcacattgttttcgttggggttacctgtgcaactgatattgataccccacttaccgttatcaatactgaactcagtaacgcccatcgtgaagccactgccccacatatttggaatagcgtgtgctacagatacggtcacagttaaaactacagccaggaaaatatttgacagtctcataattttctccccaaaattaaataaatcaatcttaaccatcgtccgggtaatatatatctgaaaatattttcaataacaccagccaggaaaaacaccaccacaggcggtggcgtttctttggggcgtctttatttaatccgggccatcgcgtttctcagtgccaaatctgcctcttccgttttctccagacttttctgcaacaccgcctctgaccgggtcagtgcctgacgcgcctccagtggtttccggatatgctccatcgccagcatcgtgtcttcatagccctgctgacgccaggtgtcgatatgtgccgatgtaaaactgagcagaccgccacttttgccttcttcccctgtttgtttcagctttttccggggacggatttcaaggattgtggtgtccggaaaagcccggcgatcccataaagaaccgtcactcagatgcgacacaatcaccatattgcatccggcatccaccagtggcgtcacaggggtattcccctgcatattttgccatccgcccataccaccatcaccgtacatttttccctgtacctcacggggacggaacagcaggggcagtgctgctgacgccagtaaggcttctttctgctgcccgtggggcaggctctggatatgctgaaaaacggagttttttgtagttccggtacccagttcagcacgaatgcagtcgataatatcctgcattcccccttccgtggggtacagcgacacatacaacggtagcccgtcagccagatcatcagtatcaagataatgatccatcagcactgtcaggggcccatctgacaacaacggctgagtcatcagattgtcaaacctgttgattgtcgatatatggtgaagaagcgtcgtaagcagtgcgcccgcacgtccggggagctggcagaggttcatggccgggagcagttttttcagcaatgaaaagtaaaccaatctgtttaccgacagcacctgattattccccagatgatcccagagcgcctccaggcgtacggcagcttctgacagatcgggagaggccgcgataatggcaccattgaatgcgccaatgctggcccctgaaaccatgctgatctgtgtaccacactctgccagtgccttaaccactcccgcctgataagcgcccaccgccccgccaccggacagcaccagccccgttttcatttctgtactcatgcagcccccttctgaaatatttcatcgaccatactttcagagaggcgttctgcagagcagaggcgaggcatgcgaaccggtaagtgttctgcagcctgcgtggttgaccagatcaccggatgctgctcttcactgcaccagtctcccagccagttaatcgcgtcatgccactcgttatctgcctgctcccggccctgaccaccaagccagtccagagtgttcagacgcacggttgcactaccgccactctcctgtgccatctgcgttaatgctttatgtctgagaatatccagtagctggttaacctggcctgtttcgccctgacgtatcacatcaccaaacgcgccccagcgaagctcttcaagtgccacataacaacgtccggcaggggaaaatgacgcgtatcgcccggcgctccaccatgagaatatctgctcaagatgtaactgcgcccgctgaacctggtcaacacggtggagtttttcttcaagatgattcagtttatggtgaacctgatcggccaggatgagtaactgctcccgtgtatctgcggaataatgcgccagcctggcagtatcactgaccagtgaactgaccctgtcgtttacccgggtaatcgcgtagtttgtggtggcaagtgacgttgtcagctccgtcagccagcgcagggacgcctcaacgccctgtgcaagcgaagcattgatggcattctgccgtgcagcgccttcgccggtcagtccctcttttaaacgccggaagaacgtgcgctctctggccgtgcggatatgctcctgtgcaacatcgattccgtttgcgaaatcaaccacaaatttttcaggaagacaggtgagtacctgacatacccggttatcagcaatttgttgaataaatggtgaagtcacagcattgtctccagctcttccctcagcgccttactgtcagtaatgagctcaggaaccctttcatttaatgcctgaagtctcccggtaagccgttcctgtgcctgctgatcgcgtttatgatcttcagagctctgaatcagcgtgttacgcagttgttcaactttctccctgaatgcgcagaaaaaggcatcgatttcctggcggacgggctggttaatatcctgctcaatggatgcctgcagctccccgaaatatgcccgggtcagtgacataacttcctctctgaccttgttgatattgatcacgctgcgactcacatcctcgtcatagttttcccagcccaggtcactggtgccaaaccatcgacaaacggtttttcatcgtttcgcctccgaatgttcaccccggatgatgtcgttcaccattctgtagttgctgcgggtcatcaggccggttgcccggcgggcccggaggatatcaatactgtttattaactgagaacgggtacaagcgctgaatcctggctggtcggtacgtaccagtgcgtatttttcaacgagaaagttcaccgcatcgcacagtgaaatgcctgcctcaatatgctgctcaatcacacgttcatcagcgaacggtgtgtcattcagtgtgaggccgtaatgctggtccaacagttgggtgagcagtgtctgccagatggtgacgggagacgggcagcgcgatgcctcccgtacgtgtgtgtcaggtaatgttttcatcttaagttctctgtaactggtagtgctaaaggtgagatattcggggttatgaggtggttgcgggtgccagtgtcggataaacagccatataaacgtaaccacagctgccgagggtgtcggcttcgcaggtcagccctctggcatacagcgtgacggtatgctgatggcggggattcagttcaccgatggtgagcatgagttccagttgtttcatcagcagtggaaaagcctggtccagatggtatgcatccgcgtcgctgaactgccctctgataccggcgcggtcggcaaggtaatgcaactgattgccctcctgcaccagacgtgccccgaaacagggcgtcacggtgcagggtagcccccaccaggggcggtcgttgttgtcgtcgggataatttgtttcatggagcgtgtctgacacgataaagtcctcacagaaaatcggtgaatgatagtttaacgatgacaggtcagccggcgtggagaccggcttcggtgaaggtatatgcattgatgtgaatggcctcatctacagcggtgtctgaggtcagccagtcgtacttgttttccagctggcggtacagccagaaggccaggtcgcgcagggcttcgctgacagcggcttccgcatcggttgtcattgcctgaccagtcggactgttccgggtgacggtgatatccatgctgtacggatggcagtaacgtccccggtgactgatttcagcctgtaactgccagaagttacgcttctgtaccgcctgcagggtatccgcgatacgatgaagctcacggtcctgaggggcatattccctgattttccggggtgtcgctggctgccagtgccagcgcccttcaaaacaggctccgtccccctggctgcagaatccgctgaaccagatgcacggctcttccataaacctgccgttgctgagccggaaaacgcgctggcggaggtcaattccgaaaatgccacagacctccctgaagtcctcatacacgttttcataccagttgctgtcagcatgatgctgacggtaccagtcgcgggctttttcctgtgcggtggaggatagctcatgcagtgtatacacggtggtggtgataattctgctcatcagaatgcccttactgactcagttcagagtgacgctcatcagccggacatacgggccaaaactgtccttacggcgttcagcaaacacggccagcacaccgggaatatcctgcacttcacgaccggtatacgtttcagtgctgccgtgccagcggtatttgccggtacagaacggaaaaagacgggatgcaggatgctgttggtgaatacgcatggcttcaccacgggtgatgattttcataatgggatacctctgaagacagaagataaaagtgaaaacaggtgtgatgtggttgtgacgggttaaagcagaccatgttcggcaaaggagaaaacctggctgccaccgactatcagatggtccggcacccggatatccaccaggcccagtgcctgtaccagacgttccgtgataagccggtctgccttgctgggtgtgacttcaccggacgggtgattgtgtgccagcaccacggctgcggcattgtgatacagggcgcgtttaatcacttcccggggatggacttccgtgcggttgatggtgccggtgaagagggtttcaccggcaatcagctgattctggttattcagatacagcacccggaactcttcacgctccagtcccgccatgttcagaatcagccattcccgtgccgcacgggtggaggtgaaggccacgccgggttcatgaagatggcggtccagggttttcagggcccgcagaatgaggctgcgctctctggttgtcatttctccgggcagaaaggaaagctgctgcattgtccctgcctccattcagtcgatgatgcgcataatggcgctgcattccggatgctgcagggcgtaatcccgcagacggtaataatgaaccgtcatggcataacactccgtacggcaggcgtgatgactgtacgtcatcagacaggcggcaatgccggcggcttccgggctcatttcagcgcggttaccgttcatggcattgaacagtacccatgtttcgtcatcatcgtcatccggttcgggggccataaatgccccgccgttgttcagggtgtacagattccagataccaccgcagtagtcttcgcacagacggtccatccagccgaagacacggggctccagggtcacccactgtggaatgaggccaaaatgctgcggccagaagctgatgcgctgttcatcagggactatggtggcaaccagttgttgcaggccagtctccggtgcacaggccgaagaggtggtgttctgagacaatgttttcatgtatgaaatccttgtaatgtgaataaatgagagggagtaaaggtcgggagctggcaacatcacgttcatcactgaccgtgagacccggtaatatcagggatgaatgatattcggctgaaattccggacagccgtacgcgtaaccgttccggtcacagacggatggccagatgccattgcctgtatactcagtctgcacagactgatttctccgggacggtaaagcagacgggtacaccaggcgcacaggtcatcatcagaaatggaacgacaccccggcagcgcctccggggcgtcgggtgattctggtgcctgaatcacgccttcagggacatgctgcatcagcgcaggctctccagcagcgtttctgccattacccacaatgcgcggttgagcttaatatcggtgtcgatgctgtgaatggcacgggtgtggatacgttttccttttgcactgcgaccggaaatcccgcctttcagcatattctcctggatggtctgataagcactccacaggtccttaccgtaatcctcccggcgtcgtggcgtcagaatgtcggcggtggtgacgggctgatgttcgtcaccataacggtaagtcagtgccgcctgtgccagcgcctggcgtgccggtggcggcagaatcagcgactgcatggcatcacgcttctcctctatccggtcaaacacgcccaccacctcgtaagccccttcaatgactctgtccaccacatttccccggtgcggaacacgcacttcccccggagactgaccacagacgcatccgttctggcagacgaacctgaagtaacccggcagcatctggtagctggaggtaccgtcatgagagttgagcagaataatttcagggacatgttctccgtttatctctccgttacggcgcaggcgcagcatgtgttttgtgtatccccggcggcccgggtcgcgcacacaggtctggcaggcgaagaatggctgaaagccttcccgctgcaggctttccagtacggtgatggtggggatgtacgtatagttctggcttcgggacgtgtgtttctcttccccgaaaatccccggcacatggtgcatcagctcttcatgtgtcagtggacggtcacggcgtatctggttcgcagcataaccaaaacaactggctaatcgcatactttgctccttatcggtggttaagatttactggtgtaataaatgaaaaagccacgtctcccggagaagacgcagcctgatgggtgaaatgaatgacgtttattgtcttagaggaccgtcactggcgagccgcgtattaagcacctttccggcatcgggttcagaattccggcagcgccagcgtcgctgaccttccgcgttgcggataacccaacggaaatgcattcccgggtcatcctggataaacacattgcggtaagctgttatgacagcaacctcctgttcgcgtaagaaaggggcttcggaaaataagagtaatgtacagcccctcatgtgttttcacctgaaaataaaaagccccagccataatggcaggagcgaatttactattgattttaataatgcgcagataagacgcataattcctttaatagttttgttcgttatggattattcgagtggatagtcgcgatagtgccagtatttaccatcaacataaaaggtcaccttaccgcgacgtttaccctccctataaaacgtatcgaaattccaggtaacattcttgccagttgaatagctgccaccaacgacaacatcaccaaccattattgcatgaacaaccacgccataagcgttaagtctgcctttaccattgggggaattgaaagggattcggacaacgcttgctgcaccccaggggtcagtttgttcaacaaagcagagacctttaaagcgtaaacgtgcattacatgggaactggttacggttttgcgcgaactccacatattccgggaacggtgcacgacctttctcaggacgctttactaatgcggcgtcgctatcaggtacgatagtcatgaacaggaaagcaacaaagaacgttaaaatgtgtcggtgtttcatgataaaaatccttcttaaattattcgataccacggcttacggaatacgaccgattaattcggcgttatggcagaaatccatggtcgtataattatccgcggccagtagatgaatgctggcagacatgacttctggcggttcgcaagcgatgtccattaaacgtggacaggctttggctttttatcgctaataactagcccagtgcaggtatccccctgcatcagtttatacacttcgtgtttactgaagctatatattaacaccggtgactcgtccgggttaataattacagattcttcagttggttcgcagtgacggatatccgaaccaccgagtgcataagtgtcggtgatgccaatttcacagaaaagaatgatagtataaagtatagttttgattttcatttcactcacagttgcgaaaaggttgaatacttacagctccattctggcaagatattgtttgaaatcttcttgcgctttcattagatcacgacgttcggacttattcattctgctgaggatcgcatcattcacacattgcgcaggcaggcggagtaagacatgagtcttatgtttttgtctgatctcttttactttacgatccgattcaccaacaccatgagtatcgagcaccccggttcgaaagaactcgtcaagttcgttactttgcgcaaggtattgagtatcgacaaagacgtagtgacacgagtttttgttctcagcccaatacccgatctgaatatcagaccataaggcgtccttgttgtttagcaagtagaaagtcctggtttcgttgtcagcgacgaaaattatgctgctgtttttactacggtaaatcgtgtatctgttacccggataattcgcaatttcttcggccttatagaggagactgtttaaatattcttttttatacccggtttcgtttttccagcctgctttttctttgtaaaaccatactccctgcggaaaaccggtgatatcctcttcaaactgacccagcgattcggcagtcgcggtgatggaaatgagtaaaccgataaccagaattaaaaaatgtttcatttcatgcactccttaaataaatcgagggccaggaagtccccctctcctgtaatcgttattcgtaccaggtattccagcacgactggataaagttattatccatcactttcttaacgtttttggcagacgggttaaacgtcgcaactttcttctcgtttatgtacagttcaaacccggttgcagtgcttattgcttttacaaagctaacccaggcgttatcgttcatacgggtaccgtcaggaaccacaccccagaattcttcaccgtcaataacgaaactaatatttttttcttccgagtttgcgaccaccttatctcctttgtaaatatagattgtgtgcgccagcacattgttttcgttggggttacctgtgcaactgatattgataccccacttaccgttatcaatactgaactcagtaacgcccatcgtgaagccactgccccacatatttggaatagcgtgtgctacagatacggtcacagttaaaactacagccaggaaaatatttgacagtctcataattttctccccaaaattaaataaatcaatcttaaccatcgtccgggtaatatatatctgaaaatattttcaataacaccagccaggaaaaacaccaccacaggcggtggcgtttctttggggcgtctttatttaatccgggccatcgcgtttctcagtgccaaatctgcctcttccgttttctccagacttttctgcaacaccgcctctgaccgggtcagtgcctgacgcgcctccagtggtttccggatatgctccatcgccagcatcgtgtcttcatagccctgctgacgccaggtgtcgatatgtgccgatgtaaaactgagcagaccgccacttttgccttcttcccctgtttgtttcagctttttccggggacggatttcaaggattgtggtgtccggaaaagcccggcgatcccataaagaaccgtcactcagatgcgacacaatcaccatattgcatccggcatccaccagtggcgtcacaggggtattcccctgcatattttgccatccgcccataccaccatcaccgtacatttttccctgtacctcacggggacggaacagcaggggcagtgctgctgacgccagtaaggcttctttctgctgcccgtggggcaggctctggatatgctgaaaaacggagttttttgtagttccggtacccagttcagcacgaatgcagtcgataatatcctgcattcccccttccgtggggtacagcgacacatacaacggtagcccgtcagccagatcatcagtatcaagataatgatccatcagcactgtcaggggcccatctgacaacaacggctgagtcatcagattgtcaaacctgttgattgtcgatatatggtgaagaagcgtcgtaagcagtgcgcccgcacgtccggggagctggcagaggttcatggccgggagcagttttttcagcaatgaaaagtaaaccaatctgtttaccgacagcacctgattattccccagatgatcccagagcgcctccaggcgtacggcagcttctgacagatcgggagaggccgcgataatggcaccattgaatgcgccaatgctggcccctgaaaccatgctgatctgtgtaccacactctgccagtgccttaaccactcccgcctgataagcgcccaccgccccgccaccggacagcaccagccccgttttcatttctgtactcatgcagcccccttctgaaatatttcatcgaccatactttcagagaggcgttctgcagagcagaggcgaggcatgcgaaccggtaagtgttctgcagcctgcgtggttgaccagatcaccggatgctgctcttcactgcaccagtctcccagccagttaatcgcgtcatgccactcgttatctgcctgctcccggccctgaccaccaagccagtccagagtgttcagacgcacggttgcactaccgccactctcctgtgccatctgcgttaatgctttatgtctgagaatatccagtagctggttaacctggcctgtttcgccctgacgtatcacatcaccaaacgcgccccagcgaagctcttcaagcgccacataacaacgtccggcaggggaaaatgacgcatatcgcccggcgctccaccatgagaatatctgctcaagatgtaactgcgcccgctgaacctggtcaacacggtggagtttttcttcaagatgattcagtttatggtgaacctgatcggccaggatgagtaactgctcccgtgtatctgcggaataatgcgccagcctggcagtatcactgaccagtgaactgaccctgtcgtttacccgggtaatcgcgtagtttgtggtggcaagtgacgttgtcagctccgtcagccagcgcagggacgcctcaacgccctgtgcaaccgaagcattgatggcattctgccgtgcagcgccttcgccggtcagtccctcttttaaacgccggaagaacgtgcgctctccggccgtgcggatatgctcctgtgcaacatcgattccgtttgcgaaatcaaccacaaatttttcaggaagacaggtgagtacctgacatacccggttatcagcaatttgttgaataaatggtgaagtcacagcattgtctccagctcttccctcagcgccttactgtcagtaatgagctcaggaaccctttcatttaatgcctgaagtcgcctggtaagccgttcctgtgcctgctgatcgcgtttatgatcttcagagctctgaatcagcgtgttacgcagttgttcaactttctccctgaatgcgcagaaaaaggcatcgatttcctggcggacgggctggttaatatcctgctcaatggatgcctgcagctccccgaaatatgcccgggtcagtgacataacttcctccctgaccgtgttgatattgataacactgcgactcacatcctcgtcataggtttcccagcccaagtcactggtgccaaaccatccacaaaccgttcaccaggcgcacaggtcatcatcagaaatggaacgacaccccggcagcgcctccggggcgtcgggtgattctggtgcctgaatcacgccttcagggacatgctgcatcagcgcwggctctccagcagcgtttctgccattacccacaatgcgcggttgagcttaatatcggtgtcgatgytgtgaatggcacgggtgtggatacgttttccttttgcactgcgrccggaaatyccgcctttcagcatattctcctggatggtctgataagtactccacaggtccttaccgtaatcctcccggcgtcgtggygtcagaatgtcggcggtggtgacgggccgatgttcgtcaccataacggtaagtcagtgccgcctgtgccagcgcctggcgtgccggtggcggcagaatcagcgactgcatggcatcacgcatctcctctatccggtcaaacacgcccaccacctcgtaagccccttcaatgactctgtccaccacatttccccggtgcggaacacgcacttcccccggagactgaccacagacgcatccgttctggcagacgaacctgaagtaacccggcagcatctggtagctggaggtaccgtcatgagagttgagcagaataatttcagggacatgttctccgtttatctctccgttacggcgcaggcgcagcatgtgttttgtgtatccccggcggcccgggtcgcgcacacaggtctggcaggcgaagaatggctgaaagccttcccgctgcaggctttccagtacggtgatggtggggatgtacgtatagttctggcttcgggacgtgtgtttctcttccccgaaaatccccggcacatggtgcatcagctcttcatgtgtcagtggacggtcacggcgtatctggttcgcagcataaccaaaacaactggctaatcgcatactttgctccttatcggtggttaagatttactggtgtaataaatgaaaaagccacgtctcccggagaagacgcagcctgatgggtgaaatgaatgacgtttattgtcttagaggaccgtcactggcgagccgcgtattaagcacctttccggcatcgggttcagaattccggcagcgccagcgtcgctgaccttccgcgttgcggataacccaacggaaatgcattcccgggtcatcctggataaacacattgcggtaagctgttatgacagcaacctcctgttcgcgtaagaaaggggcttcggaaaataagagtaatgtacagcccctcatgtgttttcacctgaaaataaaaagccccagccataatggcaggagcgaatttactattgattttaataatgcgcagataagacgcataattcctttaatagttttgttcgttatggattattcgagtggatagtcgcgatagtgccagtatttaccatcaacataaaaggtcaccttaccgcgacgtttaccctccctataaaacgtatcgaaattccaggtaacattcttgccagttgaatagctgccaccaacgacaacatcaccaaccattattgcatgaacaaccacgccataagcgttaagtctgcctttaccattgggggaattgaaagggattcggacaacgcttgctgcaccccaggggtcagtttgttcaacaaagcagagacctttaaagcgtaaacgtgcattacatgggaactggttacggttttgcgcgaactccacatattccgggaacggtgcacgacctttctcaggacgctttactaatgcggcgtcgctatcaggtacgatagtcatgaacaggaaagcaacaaagaacgttaaaatgtgtcggtgtttcatgataaaaatccttcttaaattattcgataccacggcttacggaatacgaccgattaattcggcgttatggcagaaatccatggtcgtataattatccgcggccagtagatgaatgctggcagacatgacttctggcggttcgcaagcgatgtccattaaacgtggacaggctttggctttttatcgctaataactagcccagtgcaggtatccccctgcatcagtttatacacttcgtgtttactgaagctatatattaacaccggtgactcgtccgggttaataattacagattcttcagttggttcgcagtgacggatatccgaaccaccgagtgcataagtgtcggtgatgccaatttcacagaaaagaatgatagtataaagtatagttttgattttcatttcactcacagttgcgaaaaggttgaatacttacagctccattctggcaagatattgtttgaaatcttcttgcgctttcattagatcacgacgttcggacttattcattctgctgaggatcgcatcattcacacattgcgcaggcaggcggagtaagacatgagtcttatgtttttgtctgatctcttttactttacgatccgattcaccaacaccatgagtatcgagcaccccggttcgaaagaactcgtcaagttcgttactttgcgcaaggtattgagtatcgacaaagacgtagtgacacgagtttttgttctcagcccaatacccgatctgaatatcagaccataaggcgtccttgttgtttagcaagtagaaagtcctggtttcgttgtcagcgacgaaaattatgctgctgtttttactacggtaaatcgtgtatctgttacccggataattcgcaatttcttcggccttatagaggagactgtttaaatattcttttttatacccggtttcgtttttccagcctgctttttctttgtaaaaccatactccctgcggaaaaccggtgatatcctcttcaaactgacccagcgattcggcagtcgcggtgatggaaatgagtaaaccgataaccagaattaaaaaatgtttcatttcatgcactccttaaataaatcgagggccaggaagtccccctctcctgtaatcgttattcgtaccaggtattccagcacgactggataaagttattatccatcactttcttaacgtttttggcagacgggttaaacgtcgcaactttcttctcgtttatgtacagttcaaacccggttgcagtgcttattgcttttacaaagctaacccaggcgttatcgttcatacgggtaccgtcaggaaccacaccccagaattcttcaccgtcaataacgaaactaatatttttttcttccgagtttgcgaccaccttatctcctttgtaaatatagattgtgtgcgccagcacattgttttcgttggggttacctgtgcaactgatattgataccccacttaccgttatcaatactgaactcagtaacgcccatcgtgaagccactgccccacatatttggaatagcgtgtgctacagatacggtcacagttaaaactacagccaggaaaatatttgacagtctcataattttctccccaaaattaaataaatcaatcttaaccatcgtccgggtaatatatatctgaaaatattttcaataacaccagccaggaaaaacaccaccacaggcggtggcgtttctttggggcgtctttatttaatccgggccatcgcgtttctcagtgccaaatctgcctcttccgttttctccagacttttctgcaacaccgcctctgaccgggtcagtgcctgacgcgcctccagtggtttccggatatgctccatcgccagcatcgtgtcttcatagccctgctgacgccaggtgtcgatatgtgccgatgtaaaactgagcagaccgccacttttgccttcttcccctgtttgtttcagctttttccggggacggatttcaaggattgtggtgtccggaaaagcccggcgatcccataaagaaccgtcactcagatgcgacacaatcaccatattgcatccggcatccaccagtggcgtcacaggggtattcccctgcatattttgccatccgcccataccaccatcaccgtacatttttccctgtacctcacggggacggaacagcaggggcagtgctgctgacgccagtaaggcttctttctgctgcccgtggggcaggctctggatatgctgaaaaacggagttttttgtagttccggtacccagttcagcacgaatgcagtcgataatatcctgcattcccccttccgtggggtacagcgacacatacaacggtagcccgtcagccagatcatcagtatcaagataatgatccatcagcactgtcaggggcccatctgacaacaacggctgagtcatcagattgtcaaacctgttgattgtcgatatatggtgaagaagcgtcgtaagcagtgcgcccgcacgtccggggagctggcagaggttcatggccgggagcagttttttcagcaatgaaaagtaaaccaatctgtttaccgacagcacctgattattccccagatgatcccagagcgcctccaggcgtacggcagcttctgacagatcgggagaggccgcgataatggcaccattgaatgcgccaatgctggcccctgaaaccatgctgatctgtgtaccacactctgccagtgccttaaccactcccgcctgataagcgcccaccgccccgccaccggacagcaccagccccgttttcatttctgtactcatgcagcccccttctgaaatatttcatcgaccatactttcagagaggcgttctgcagagcagaggcgaggcatgcgaaccggtaagtgttctgcagcctgcgtggttgaccagatcaccggatgctgctcttcactgcaccagtctcccagccagttaatcgcgtcatgccactcgttatctgcctgctcccggccctgaccaccaagccagtccagagtgttcagacgcacggttgcactaccgccactctcctgtgccatctgcgttaatgctttatgtctgagaatatccagtagctggttaacctggcctgtttcgccctgacgtatcacatcaccaaacgcgccccagcgaagctcttcaagtgccacataacaacgtccggcaggggaaaatgacgcgtatcgcccggcgctccaccatgagaatatctgctcaagatgtaactgcgcccgctgaacctggtcaacacggtggagtttttcttcaagatgattcagtttatggtgaacctgatcggccaggatgagtaactgctcccgtgtatctgcggaataatgcgccagcctggcagtatcactgaccagtgaactgaccctgtcgtttacccgggtaatcgcgtagtttgtggtggcaagtgacgttgtcagctccgtcagccagcgcagggacgcctcaacgccctgtgcaagcgaagcattgatggcattctgccgtgcagcgccttcgccggtcagtccctcttttaaacgccggaagaacgtgcgctctctggccgtgcggatatgctcctgtgcaacatcgattccgtttgcgaaatcaaccacaaatttttcaggaagacaggtgagtacctgacatacccggttatcagcaatttgttgaataaatggtgaagtcacagcattgtctccagctcttccctcagcgccttactgtcagtaatgagctcaggaaccctttcatttaatgcctgaagtctcccggtaagccgttcctgtgcctgctgatcgcgtttatgatcttcagagctctgaatcagcgtgttacgcagttgttcaactttctccctgaatgcgcagaaaaaggcatcgatttcctggcggacgggctggttaatatcctgctcaatggatgcctgcagctccccgaaatatgcccgggtcagtgacataacttcctctctgaccttgttgatattgatcacgctgcgactcacatcctcgtcatagttttcccagcccaggtcactggtgccaaaccatcgacaaacggttccccatacgccactctgccgacggcgacgggtgacggtctccgttctttcctccataagcgcactcagatttgtttttaccgcgagccgggtctgtaactgactgactgccggaaaactgatttttacggtaaagccctcatcctccaggcgggcattgatgcgaccggcaatgttttctgtggcgtacagggccgtgccacgaaaacctgtttcaatcccgctgacgattttctccagctcaggccggaactgtgcttcagcctcacggtgcaggctggtcacagttgactcaatttcctctatatattcaattgcttccctgcgattatttagtgttatctcggggttttccgggtcaaagtctcgtttcctgtaatcttcccagcccgggttgttgataccggaccattgagaaatctttccccataatccggaccgggaccttcgttgttctgcgtcttcttcctccaacatttgctgttctttgcgtttaccagttctgaaatagtcattcagctcctcttccagtgaggtgcagacccccgtcagtaattcccgggttctggcatcgatctcctccatggccattctgacatcagcggtcacctgctcctgacagtccgcgattttccggatatccgcaagcaggctggtgatattcgcctgcagtgactgaatgctttgctgcagcccctgatggcgtaatgacagatattcgctgacattttctgcattctgcatcagttttgcggcagcagaatcaaccgccagtgccgccgctctggagtgtgaactcagtatgacttccgttatcagttgatcgataagtgagccttcccacaggtctgtcgccccttcagttgccagttcgctgtctttacagacgtaatcttttttcatgcgaccgaaggcttccctgacaaaatcatcgacccaggcttcatcaacaggaagggttccgtttttccgtaactcatgaagcgcacggttagccaggtatgcctggcgtgaggatccgggataaacgcgggaggcgggcagcacatcgctgttcagcattgccggaactttctggcgtacggcatctgccccatcgccattgcggtctttctcatcaaatttattgaccagtacaaacaggcggccggctgatacgtcagcaatggcattaagctctttacggacgtcttcatccgcttttgagttcatctgggtgtaatccatcacagccagaaccgcagaggctttctgcagttgatcccgcatcatcacttccatctgcggttgtccggcctcattagggccgggggtatccagcagtgtgagtgttccctggcatgcatccatccccaccagatggctgaattccacgtcgatcaccggcagtttctgcacttctgcgtattcatcaaaaggaaattcagtccccattgccgcagcaagacgaaccagatcgtttaacgatgccagtccggtaaagatttcctcctccccgtggtattcatttttgagccagccatcatccgtcagaatatccagcagttcgcgggtatccccggtttgctgcagggtctgtgcgacctgctgtcctgccggggtggcgagtttttcctgcagtgtgattaataaattgcggacaggctgaatatgttccagatggagaaccggctcagtttttccgggaacgtggcggatgagcgtcggtacagaggtcatggggcggttacggttaggcagaatttcctgccccacaatggcgttgatggtggttgatttgcctgctttcatcgtgccgacaacagccagcaccatctccctgcgggcggttttgatttgttcgccctccagctcctcaattcttttcagtgctttctgtttatcaaaaagcagtctgttttcgttcttactgtcagataacacatctggctcctcaaccatttgccggagcagattaatgttcagttgcaaaagtcggtcggcttcatcacaaagcagggcgatgttcttttcgtgcattatttaaccttcctgagacgcattttcatgacaaccacggaggaggtcatttactacaaacgatcgtttataacgatcgatatgatagtaacgatcgatgtattctattaacttgggaagcacaacgcaaggggacaccccgggtatggctgcgtttgcatagtgttttcatggagttaaaaatctgtaacaacagcctggtacatcaccaccgggttcagaagaaaatccagttccataccgcgcgggcaacagagaccaccgtgtcacgaactgcgcgcagggccgtacggacaacagaggcaacacagacactctccgccgtgtcaaatatccggtccaccgcaccggtaaactgttcacgggtctgagtgcggacagactccgtgcgcagttcgtcctgcaggcggtgtcatcagagggatggcggcatgtccgggaagcgctgtcatgagtgcactgaccggggtgacctccccctgaaacagtgcattacagagtgaggatttaccggccccgcttttacccataatgccaggcacgggttcgtggctggtgagtttgcgcagatgttccaggatgtgacgggaaagtgagtaaggcagggaggagagcggtttttcaattgcctcaatggcatcagacggattcatacatgtattcccggtgaaaaaagacaaaaccccgcgcaccggaaaggtggcggggggattcacggagataatatctgcctgaaattatttggaatgcaggtatatgtggctgatttgtatcagctaatgagtacaggtctgaatctaatctgacagtccgctctgtgccaggagcggactgtccaacccatccctgaagagcctagattatgtatggtaattcagtcatcaaaataacgttggtcaccatcacaaaattcacatcctcggatatggctcagttcaggaacgctatcgctcaggtgaccgcaacaaccacatacatgaagctcggtgtaatagatgaaacactgagtgcaaagatagccgtctccaaatttacatacgctttcaggagtcatgcaattggtacatccagcaggaaatacggagagtagctgttcatccacactgtggaacaactcctcatccagcagtttatacctatccgaagtgtagtcgcagtgttcgcattcaaaatcactatctccctcaggtagcaattgaggtatttcgcagtctggacaaactagggtaatttgccttacagcactggtgcaaaccttacaccgcgtaacttcaagcttacggttttcattaccggtcgtttcagtccctgttaccgtcgcatgctgatggcactcattgcagttaccgatttgaatattcttttcagagagctgctcgagttcaggcttaacctgtttaaaccgcacctcggcataaaatttgtttcccctaatcagacgagtttcaccgaaagccagcttccaattatgtttgacaccgaagataactttccattcatcccttaataaccggttcagggcaaaccaggcgtcagcttgttctttgagtatttgacgttgttcagcctcggtgaaagtggggtggtagaaatgaactacgcggttgcggtgctttctgaccttatcaaaagcactgtccgtttctctgtctaggggtctttcaagtacgtccttaagcctttcacgggtttcttcgtaggtcaccgactgaaaatcaccggctaggtaagcctgcttttttattggctttttcgggctgcagaccaacgaccagtgttcgtgcgccagcggaactttcagtaaaatctcgaccgcagtccagaaactgacgacggagaacttcggcttcgaggcctccaactcttcacgggctttatccagaaaatccagaccattgttgatcagcgcctgcacatcctgactgagttcacggggggcgggagtatcgggtgcagtatcgtcaacatcgaacatcattatctcctttaatcagcttccaccacgcagttgctacagcgcgttagttgtatccagtgtaaactggacttggtagctggcagccacatcgagcgcaaaaaaccgtaaattaacttctgtagactcgtacttttcgtgacccatgcgtacccgcaggatcttcgggtgcacgtgaccataaagcaggtgcctaccaaagctgtggcgattcagatccctaaactgatggggtcccaaaaagtatgccatagcaagtgtaagtatccctaaaatctgcactattctctttttataaatcctctgacatgtgaattagattgccctaaagtgagcttccgcgcctcgctcataaggacaaccatactcaaatctcccacattgcaggagatttgagtatgaacacgtcaccgtggaacaaagaccgtatcataggccaaaaaagaccacttcagatatctcatatctggggtatccgaatccgacttgaactggaaggtaaaacacgcgatttagctctgttcaacatggccttggacagtaagcttcgaggctgtgatctagtcaaactcaaagtatctgatgttgcatatggtagctctgtttcaagcagagctacggttctacaacagaaaaccggcagccctgtccaatttgagataaccaaagggacaagagaagctgtttctgcattgataaagcttggcaatttacgcagtaaagactatttgttccgatctcgggtcggtactaaccaacacatatcaacccggcaatacaaccgaatttttcatgggtgggtagcaaaacttggtctcgaagattcgctttacagtacacattccttgagaagaacaaaaccttacctgatttacaagaaaactaagaatctcagggtgatccaacttctgttaggccataagaaactggaaagcacagtccgttatctgggcattgaagtcgatgatgcgttagagatctctgaatcgattgaagtctaaggttgccagggctgcaacagcagtcctgtgccagatgcggacgttgctctattcatgtaagattaatagaatgtctttcgataaatttttgacttaatcttaaataagaatgacttttttgcatgtcagcgttttactttgcattcagaaataaatagaattttgaaaaaataagagagaaatcatgatacactccaaaaaaattaaaaaacaaaaagagaggaactatgtcacatccccctaaaaaacttaaaaaatcattaattactgtttttttgagtggtattcttgctgttcttggatattttgttgcattgaacggagtgtttgatttatatcaacatatcgcagataattttttgcaaaaaaaagcagaggataatcttcatgtgatttacaccggagcgtcaataaagtacatcgagtcaatttttggccctcccgtgaaggaagaacattctgaggatgggagggttcatgagtatatttactctttcaaaaagttctatctgcaagtggtttatgataataataacacagtgatactctattccgtaaccagcaaggatgagaattttcatcctgaagtaccatatctgagaaaaacccttggacataagttcaaagattttggaagtgatattgattatttacagtcgagctattcttcgaagttctatcaatatgaagaagggcattatttaggaaatcctggcaactatagaaatttttaccttgcctataaccctgctggagttgattattttgagttagatccacttccagatctctctaatgacgacaaatcgcctccaaataaaaatgatcttgaaaaattcagaaataataatgctccaaatacatttggggttggcgatatccacggaggtcctgaggggcttgagttaagctttggacttgggattgattattacgatgcgagagatattccagataaagattagtgatcatgtatcataccatttttatatcgtttcaaattaggtagtcacaattagactagttaatctaaccagcactgaggtccgctcctcgctcagagcggacggccttcgtgaaagttagtcttgttgtggtggctctttccagcgccattgcaagacattctcatcgctgagaataaacagtcctgaccaaattgccgtccaaaactggatattcagacaccatgggcgtgtcataaaccagcgtaacggttttgcttcaaacagatgaataccttttcgcgatggtgaatataacggggggcgtcccactaacggcagacaaaagccccatttccaatattcagcaatacgccttcgggcacattcaattgcattacagttccagatgataccccaacgccgtttccatgtatcattgagacaccagttttgcattagcgaatatttgggcgaattgtcaatagatatactttcaccagtcattaattttatcgtgcaatattttaactggtactgttcaaccgtaaatgcgaatccatcatctagaataagtacatcaagtgtaggaatatttgaaagcgttaatattatcggtgagttatttacatcatgaatgcatagtgtttcttggtagcgtaagccactgccaatggcttcaaaaacaagttcaacttgttgcagtcgttcctctttgcttctgaaagcaatacgtgaacaacgaggttctttatctgtcaactgagcaaatcgtagactgtactccaaataattccctaaggaatgccagctcgcccctagcctgtgtctcactgcccagcgctcatgtgagagttgataagtttttatcagcattatctgggtaagagtagaccagcatttcttcactactgtaacaattgcaccaaaaggaacaggaagtgacattactaaacccctacaaatatcagataattaggttttatatcatttcagtcagtgtaatcaaatgataatcaggattggggctaatcttgaacgccactaaagatcggcaacaatggggatccaatgtttcgttagtgatttttcgcattagcagatacatgcttacttccgctcctcgctctcagcggaccttcagctcagtgatatcgtccgctctgtgccaaaggcggacgctcaagtagatactgtcctgacagtatgcggtaatcagagttgttatatattacttgcgtccaaaccagctttctgacaacccggccgctcctgctttcaacaacgcgccgccatacttttatgctgcaaagagcggagacagaaggttagcgtaatttgtaaataacttacattcacgtgtgatctggatcataattttgcctatgcaccgatcgtaatataaatatttacataacgatcagtgattcatgaaaactcaaataactttcgctgcgcttttgccagcattagcgtctttcataccgcttcatgctcatgcctcgtctacttctgaagatgaaatgattgtcacgggcaacaccgccgccgacaccaccgattctgccgccggtgccggtttcaaaacgaacgatatagatgtcggcccgctgggaacgaaatcctggatcgaaacaccatattccagcaccactgttactaaagagatgattgaaaatcagcaggcgcaaagcgtcagcgagatgctgaaatactctcccagtacgcaaatgcaggcgcgcggtggaacagacggcataacaaccggggagaaacgtaaaaaatcagtaggggaatattcctgccaggagagaaactgttgtgtacaggcaatacaggttgtctgttttgtcagtgaagccggtataaacggaagatgattttgtgttgccggaatatgggatggcgttttgccgtgacgggatcagtattttcagtgatgattattactgtgcaggggagtaccggagataaaccacgccctgtacctgccagagcggaggtttgtatttactgaacggaagataaagcgaggtaaacactgttgcggtgagcggagaagactgagattattctctgtaattacaaacaacagtgatctgatccggtttttttaccgttacgggtttccggggatcaattttatagaccggggtaatgaccacgccggaatttatggagaaaagcgggatccagcaataaacgtccggatatttctgtgtctccggaataccttttgcgccagaggccatcagatctttaacgctcacgaaaaatgactgccgcagatcaaaaaagtactcgtcatatatcacgtcttttgccagcaggatgactgcattaccaacagccgcttttacaggtgtcccaccggatggattatcgtgattgtatattgttctttcaatataaataaaacaggcatattttgccttctccccggacagttgcatctggtattcgcaaatgtctttgatacgccggctttcaacccgtccaatcatcttatcccggcgatagtgtcttttatgtttcagcgcgtacagaacaccatttgaactgtcaaactccaggattcttttggtgaaaagtttgttttcccagatctccagacaatacttctctgcactgacgacattgcgtttgtgaggaagatcccgttgatacactccatttaataagcgtgactgcagtttgcctgcaagttgataataacagttaatatcgttaaggacaggtgctgtggcgctgagtaatgcgtcgattaccttagagcgcgaaagtttgtgggtatgacagtactcatccacaattcgcagcgtctcatcactggtcatattgaaagttatacgtgttgtcatgatgaaattttctgttaatcatactggttgatatgcataacatttcataaaaaatacttttaattcatataattgattttttgactggttttatcctcgtgtggtggaaagtagtgttactgccactgtagtcagcataactctatcacacagaaccaccgaaaatgaagcattgctcaggggggaagctgccactcgtacgagttttctgagcaatgataaccagtatttttcgttttgggcgatttgtttatcgttacagctaaaaacagttcatgtaccattaaaaaataataaaggttaattagtattatttatagaagtatgtttatgtaattctaccgtgtaaatgaactctgtcattgtaccttgtaattctatcctgtaattctacctcgtaaatacaccttgtaaccaagtcctgcagaagtctgtctcatcgaacaatattcctgtgcagcgatattctctgtagtagtacttgtaactctgcccttaactctctcttcagtaatgtagtcccgccacacctgaatataaatctgtaatgttcacacactgactgtaacgtgctttgttaagtaatgtctgctatttttttctgttatttttcctgttgttttctgtattttgttgtatggtgtaataactattctgaacccgtcatcacctttatagctaagagtatgacttcgccagtgttgatactgtggataacggtgattaaggaattactgttaatgatctgttcctgcagctcacctgatgagttttggtagtaatacgtaaaagagtatgcctcatgtcattaaaaagtcttccggagtgttgtttaaccctgtacctctattactcatgtagtacgttgcggaaagctacgttaattgtaatatctggttatggcgttatgccttcagtattaaaaacatcttttaccggagaaacagggaagtggaaaggctttcgggataacgtcaggccattatgacgatattacgttaatcacagtacaagataacgagagggtaatggaattttaaaccagagtagttccactgttgttcactggaaaaagtgatttcccacgcgcgttataagcttactccagaggagatggaagccttcaactctgcggtcgatcaccggctggcagaactgaccatgaacaaactttacgatcgtgttcccgcttcagtctggaaatatgttacctgataaatgtttctgatgaagtacagtcgtcacaatgacatcacttcagatattatctgcgctgtgattgactgtcacgtatgccgttctctgtatggttctgatacccgggtgtggtcccactttctctgtggcgcccggggagttgtgaacctgcacgtcttcgtgtgataacgttttcttcaaaaattacgccagcgcttcttcctgtgttacagaacacgaggaagaaacatgaagacttacaacaccaatcccggttacgaaatggatccccagctcctgacacactttaaccagcatctggattcattattcggggtatattcgaaactgttaccgttcagaatggattttgcttaccgaaaaaacaccctcagctacaggtgtgcctgcaggtacgccatgtgtgcggagatactgcgactgattaacgaagtgggagagaaactggtcgggtatgcctgggtaatggaatatacggaacgtaaagggcttcacattcattttgtgggctatctgaacggtcagagccacaggagttcgtatctggtatccagattgatgggagatatctggaggcgggttaccgggggggatggttactaccactggtgccggtttaataaaaattatccggtaaacattaaccacgtcattcactattcagatcacaaagcggtgaatgccttacgctatgccctcagctacctggccaaacgagaacagaaagaatgtggcatcatcctgaaatgcagcgggcttcctgaaaaaagtaaccggggtcgaccgcgactgggcagcaccctgccggagacttattctctggtgtaagaccctgaacgacaactacgggctggcgctaattgttacggtcggttccggaggccacttcagggactctgcgcattttttacgacatggctattccgtatgaaccatacggagatttaaccatggcacattctttaccattccttccggcaaccgatacagcgcatcccccgatgtccatccctgcctactgacagttttttacgccggtgggccattgtgtgacaaccacagtgctgtaacagcaaccagcctgctttacccaaactccagtccagattttaactgaaccgccattcaccccctgaccacactgcccgtaccgggacagctgttgcctgcgtgtcgtctggcggctgaggaatatgacgatgtacgcaaaatcctttattgcatttgatggcaatgggcgtctgacgggtgcccgtaccgcacagactgcaccttacgatcgctacacttgccacctttgcggcagtgcgctcagataccacccgcaatacgacactgagcgtccctggtttgaacacactgacgacgggctgacggagcacggtcagcagtgcccttatgtcagaccggaacgcagggagatacaactgattaagcgtctgcagcaattcgtaccggatgccttacccgtggtgcgtaaagccagccggcactgcagacaatgtcatcacgattattatggggagcggtactgcacgcactgccataccgggcacttcagtgaggagggggtggcagaatgaacggtataaaaacggggctggggatcacgccgggtgaacacataatcagtgctgattctgcactcagcagaaatatccggcagtgtttctgcctttcctgtcatggccggttgattttgcagacagatgctcagggggcatggtttgagcatgatttatatgccctgagcgagcaacagaaggcagcctgcgtggtgctgaatccggaaaagtcccacccttacattgaggatatggagatgtttttatcgccattaccggtcgtgctggagtggcattgtatgatgtgtgagcagttttttcatgggaagaaattctgtgaggcctgtggtacggggatttattgcagagcggtatgtacgaagtctgtttacagctaccagccagacttgtttcaggactgcggaggtgcgagtacttaatccgaaatgcccgacctgctcagggcgttcagaggtatcggaacctgcattttatctggtgtttcgcacccaccccgttcgtgacacaaaggcgcgacaccggatatccgcagtcctgcttacctgaataaaacccggggtattgattgtgtactgtggtgcgaaatcgcaccgtgatcgcggattcgccgaatccgcactgtggtgtcaaccaaccatacgcgagagtcctctccgtatttatcagtgcctcaggacgatttctgcatagttaatccagggggctgcattgtttatttccctgctaatggacgtgacatccaggatattcatgatcctgatttccctgagcagtatcagcgcttattggagcgtctggattatcagacgatgcccggtactaaagcatcaggccagcgtaactctggctacagcggtttttgacctgttgtaactgtaaggtgatttattatgtatacagaatcaaatgttaagctttcctgtaacgccctctggcaaaagtgtgtccttgcaactctgtatcgggctgcagccacacatcctgaaattaaattattacaatttaaattaataccagggcagggtattaataaggccattccctctctgatggctgattttactggtgaactgcatagactcatttctgaatatttgcagtgtaagcgacgtaaagatcaatctgttgagcccacccctttatattatctctggagtagggaagctgtggctaacgataccactccttatcttatggtgctgctacttaataacgatgtctggtgtaagagtcgtgaggtggtggttctcagaaatctgattgagcaggcgtggggaaaagtattgggtgaagataactccattacacatctggttgtgtatcctgaagtgctgtcgttggtatttgatgcagctaacacatacaacgctgagcctggtgtactggaacagacggcccgggcttacattgaatcacatggtaccattgaacgtcatcttgggtgtagtgacttttaacgtcaggtgacgcattgtcacttctgacctgctacctgtacgccggaatataatggtcagagaggcatatttcgacgcccctaatctggggcgtttgattcaggatgtctggaataatccgggctttgtgtcaccgggcgcatcaaagcagtaccacccgggatgtggcgctggatcgtcatttaccggactgcgaagacatacttaaagaggtgatatgggcgttcagtgattttgtccgcgatcatcgaggtgtgtatgatccggaagcccgttacctcgccggtaatccctggtatcccgtaacaggccagttctgaaagcacagctcagcagattccccgcattcgcacaatcttcataaatctcacaggggacattctgaccgtgttgactacaacaagccacgacagcgtatttctgcgtgccgataattccctgatcgacatgaactatatcaccagtttcaccggtatgactgacaaatggttttacaagttgatcagtgaaggccatttccctaaacccatcaaactggggcgcagcagccgctggtacaaaagagaagtggagcagtggaagtgaagtagagcagtggatgtagcaacgaatcgagtgatcaagggggggggctgcagtattgttcaggattagtattatcagttgacgctatagaaataatagaaaaataaaataacttgagtgaatttaatgaagtcgtagaggttctaattagtatacctctggtaaaactatattgtttggtaaaagaaaggtctgctgaaacgtttaatttccattacaacagtaaacttatactcagattatgtaatatcgacatttgagataaattgtgaagataaaagagaagccatatttattatatatggcttctcataataactcatctatctaataaatttttaacgtaattaaccaattctttatctttactattattaaagaagcatttctggaatttttcgccaccaagagcttgtttaagtaactccggatcgatggcctggagagcatccatgagtggcttactaactgcttctttcatattactcagtataatggcattcgcattttgtgattcacgacgttctgccggatagcctaatcccttttcgccatcaaatgctttttcaaaaatatagcgcatgtttaattctgccccccagccaaaaccctttgcaaatggcaaggacagtgcattcccattatttacctgtgcaaacaggtaggcatctgttggttcgatgcaataaccacaagtaactcccgggaatgtgttcagtgccatcaatgccccctgtcctgtaccacagccagtaataacgaaatcaacagatctgctgtttaacaagatagccgaaataatgccgagatgaacgtaagtcagacgatgatcattgtcatcacacattcctacattgaaaatagtatggccttgatgtgcgcttgctgcaactaactcattaaaaattattgcgtttttagatgcctggctaaattcattcatcaatgcgattttcatacgaattcctcatttaaaatcatactgttaaacttcatagcataacaacatgaacgatatgataatacattacaaacattacttgcaacattgtatttgaaaattcaaaacatcatttcatttttattgttgtgtgctctcgatcacggtttgctgcacttttgaacgctatattggatgctaacgaaacgatagaaacgatatgatgaagtattgtcattcttataaaggataagattatatggctaagggtgatattaaaaagttgaagtttgaatctttctacgatagtgaatcgaataacgaagttattcgattaacgccaacagatattctttgccatcgcaattatttttatcaaaaatgttttacaaatgatggtaaaaaattgattttcgctgctgagtttgattgtaaccggaattattatcttatggatttggtaactcagacagcgaaacaactcactgaaggagctggagataacacctttggtggcttcctgtcccctgatgataattatcttttttatgtgaagaatgaaaaacatttgcagcgtgttgatttgaccacattagaagaagttaccatatacacagtaccggataattgggtggggtacggaacatgggttgctaatactgattgtacggaaatcgtcggaatcgaaatcagtaaaactgactggaccccgcttagcgactggaaaatatttctggaattttatcataagaatccacgatgccgtttaattacgattgatctggaaaccggaaacgctgaagtgatattggatcgtaatacttggttagggcatccaatttttcgtccgaataataacgatactatcgccttttgccacgaagggccccatgacctggtggatgcaagaatgtggatgattaaccgtgatgggacaaatgagcgtaaagtgcatgagcaccaacttggtgaaagttgtacacacgagttctggatccctgatggatctgcactggcttatgtttcctatatgaaaggacagcaacagcgttatattcgcaaatataatcctgatactgatgaagattcattagtgatggaaatgccggcatgttcccatttaatgagtaaccataatggtattctctatgttggtgatggttcaggtagtccggttgatgttaaagatacctgcagttataaaattgaaaatgatccctggatttacattcttagcagtaaaaataaaaaaatacataaattggtgaaacataatagttcctggagggtacagaaaggagaccggcaggtaacgcacccgcatccatcattttctccagataataagtacgttttatattcttgcgatgccgaaggtgaaccagcactatatatggctaaaattcctgaggaaatcttaacccagcaataactgacaaatttttcactattggagtttttatggatttcatcaatatgttctctcttaaaggtaaaaatgctttagtcactggagcatcatatggtattggttttgagatcgctaaagcactaagtaacgctggtgcaacgatcatttttaatgatgtaatagaagaaaacattaaaaaaggcctggcagcatataaagagaacaacatcaacgcacatggttatttatttgatattacagatgaacagtctgtgaaggaaaatatcaaaaaaatagagagtgacgtaggcattattgatattctggtaaataatgcagggattattcagcgtaaacctatgctagaaactacagcagctgattatcgcaaaataatagatattgatctgacaggtcagtttattatggctaaggcggtattgccttcaatgattaaaaaaggacatggcaagatcattaatatctgttccatgatgagcgaattgggtcgcgaaaccgttgtaggctacgcttcggcaaaaggcggcttaaaaatgctgactaaaaatatctgttctgagtttggtgaaaaaaatattcagtgtaatggtattggtccaggctacattgctacacctcaaacagcaccgttacgtgaaattcaaccagatggcagccgccatccatttgatcagtttattatatcaaaaacgccagctggacgctggggtaaaccagatgatcttgctggtgcagctatatttttagcatcggatgcttcaaactttatcaatggtcatattttatatgtcgatggtggcattctggcctacattggcaaacagccttagttatattcagtcataactgtatgtactactttaaatattttcagagaggtggtgatgtttgtatttaatgaagatacagcaatagaagatttaggcaacggggtcaaaagaaaagttttggctcatggtggcaatatgatggcagtagaggtccatttctctaagggggctatcggctctttacatcaccaccaacatgaacagttgacgtatgtcttatcaggtatttttgaatttaccatcggcgatgaagtgcgtacagtaaaaactggtgatactttatataagcagcccaacattgtgcacgggtgcaaatgtctagaaaaaggagttttgcttgatatatttacacctcaacgtcaggattttttaaagtaaatacccagtattaatatgaactaaaatggtagcgcataaaatgcgctacatattgatatagttaactaattatctattgtttttctttctgccatagacagctttaatctgaaaaatattatcttttaaatggaaattttagaaataatagaatctgattatccggatatttagttgaattctataaagtcgagtgaacatattgttgtatcaatatagttaatttaaataattcaggaaaaacacatatacagtgagactctataaatttactttataaataacagtgtaatgttacttcaataatatactccatcttttccaggagatggaaatggacttttgttgtggaagaggtatcataaatgactgaagaaaacagaagaataaaagccataactcgtttttcatatggtagtggaaatcttatcggcagtggagctctggctattagtggagcatggttactttatttctacactacattttgtggattgacagtttttcaggccactgtaatattttccattgctacttatctggatgtcatcctgaatccactaatggggtttattacggataatttttatcagacaaaactcggtcgtcgctttggtcgtcgtcgcttcttcatattaattgccattccatgtatgattatctatccattgctttgggtaaatggtatgagtttttggtattatctttctacttatatcatttttgaagtggtatatactatgattatgataccgtataataccttacctgttgaaatgacaaaggatttcaatcaaaggacctatttgacaggttctaaagctatgtttggtaaagtagctaatttcttagcagccgctattcctggtatctatttttacttcttcaataaagattcagccaccccatttttcctgaccggtttaacttatgctattattatgatcacttcattaataatgctctatttcaacagttgggaacgtccaactgatgatgtagttgatgaatcaacgcatggttttatggagggctttaataaactttttaccgatcttttctcaacctttaagctaaaaaccttcagaacccatcttggtatgtatctatttggtttcggcgctgaatggctatttacagcgacatttacctatttcattgttttcaaccttgaacaaccgagaacatttgtttctgagatgaactcattaagcagtatttgtcagttcttctctacagcattctttatgatgtggtgtgccaaacgaggatttaaacgcccatttatcattgctatcttaattgttgtatcttcagtgattggttatgttggtgtgtactatcttaatattccccatctgacctggctcattattggcatcactatctggtttggtctggggacgggggggggtatattacattccgtggagtgtatatgtattccttgccgatgttgatgaggtcttaactggtcgtcgtcgtgaaggtctttatgctggtgcaatggttatggccggtaagttaatgagagccactgtagtattttgtctgggggttgtcctcagtctgtttggttttgagtcaggcattcatcatcaatcagccagtgcagtaaatgcaattaatggcgtcatgatatttggtgtggctggtatggcgttaataggtatctatttctctgtaaaaatgaaattagataaagcatctcacgccgaaataactaaagaattagagcgtctgaaaaaaggtggcagaaaagaagatgctacaccggaaattcgtaagcttgttaagcaactgactggttatgaatatgaccagtgcttcggtaataacaatgttggctttaaatttgaaaacaaagcaggggcattctagaatgaataagcacacactattactgactgttctttttctgaatttgatttgtactcccgtttttgctcaaaactggcaggtggcgacgtttggtcagtctacggatctcaacttttcatcgctgatagattcggccaagatcggacggaataatgcctggcttgcaggaaacaataattttcttgaagctggaaaattttacactttaccaacagatttttttattgaaagccgtgggggaaaaattgctaactcccatgacggtatgaccgtcttttatactattgttccggttactcagacattccgactggaggctgatttgacattagaacagattggtccggaggtgaatggaaaatcaccagcgggacaggagggagctggattgtttgtcagagatattatcggtcctcagcgacaggaacctcagtcagctggaacagaagaatatccccaggcctctaatatattgatgaatgcctttattacacagaataaaaagaatgataacttagtacagattacttcaattgttcgtgaaggagtaataaaaacatggggtaatgaaggtattacaattaagaaacagccgatcattgagaatataaactttacgcaaaaaagaaatattcatatgacgatcgagcgactaccagagaagttcatcctgaccgcttttgataccgatcgtaaagaaaatcagtcatggcaattttctgattactcaggctttatgaatcaactggataataatagtttagctattggtttttttgccgcacgaaatgcgaaactaagggtgaaaaatgcatcatttaaaccgggcaagccactggttgattacaaacaattaacttcacgtcaattcagtcgtgtccggcataaagcccctgaactttttcttgcttcacctcaatccgttgtaagaaactcaacaactcttcaatttttggccaatcaggctggaatagtcagtattgataatgataagcagactaagcaggtgcaggcgggtgaactggtacagtttccagttactttgcaaaaaaaacataatgacttcaccgtcaactttaacgttgatgggaatatatcaaaaaaagctatacgcatagagcaggttaaatcaaacctgactgatccttatgagatttacgtatgtagtgattgtcgacagggggccagaggcagcaaaaatgaccctgtagatttacagacagccgtaaaatttgtcgcacccggcggtaatatataccttaacgatggtcaatatcatggaattaccttagatcgggaattaagtggaatacctggcaagtataaaacaatttctgccattaatccacataaagccatttttataaacaagacattcaatctggatgcaagttactggcatctaaaatccgtggtctttgacggcaatgtggataatggaaataataaaccagcatatttgcgtatagctggtagctataatattattgagcatgtgatagccagaaataatgatgatacgggaatttctatttcagcgaaagataaaaaccgttttttctggccagctcataacttagttttaaactcagattcatataataatcttgatttatccgggattaatgccgatggttttgctgcaaaattaggtgtcggaccgggaaacatttttcgaggatgcattgcacataataatgcagatgatggttgggacctatttaacaaaattgaagatggtccaaatgcatctgttactattgagaattctgtagcctatgaaaatggcctgccatacaataaagcggatatcctaaaagggagtattggcaatggctttaaattaggtggtgaaggtcaaccagtaaatcacaaagttattaattccattgctattaataataatatggatggattcactgataattttaatactgggtcattgatagttagaaataatatagcaatgaacaatgcacgctataattatattttaagaactaacccatataaattcccatcatctatcctttttgataataattattcaatcagagatgattgggaaaataaaataaaagacttcttaggtgatacagttaacagtgtgaattataaattgcttgtttcacatgaaacaggaccggtacaaaaagatttatttttcacacgagatgatagtggaaatattatctatcctgatttttttcttaatatcattaataaatttaattagacaatgcccattaacctgctgcctaccggaagcaggttattccagaatggacactggcagtaatatatctttgttgacaaaaatataaaattttgttatgggattttatgatgttgaagaaaacgatatttatattaacgttattctctggcaacgtaattgctgcaactgtagaattaggttttgaaaatgagcaatataattatgcttatcgttctgcagatgtcttcatgccgtatattaagagtaatttcaaccctgttactgattctgctttgaatgtgtcactcacctatatgtatcaggatcaatatgggaaaaaacataaaaaaacatctgaggacagatttaaaaccaatcgcgatcgcatagagctctatcttaaaggttatactttaaataggggagcatattctttttctccttccgcaggtttccgttatgagtcatgggatgtaaactacgataatccgaaaaagcaggataagtggaaactggaactacgcttttatcctaatatgacttataaactcaatgaccagttaagcctatatatgaatggttttgttgcccctgtattttttaaaacacaacaagagtcgagaaaagataacaattatgtaaagggtaagttaggggcgaaacgttataacaacgattattatcaggaactccagattctgggtgtcagatataaatttaataatgataatacgctctgggcatcagtctataatgaaagaaaatataatcaacattcctcaaaatatgatcgctggcaattgcgtggaggctatgattttaaagttacagaggagtttgttttgagtccattcataagatatgacctctcttatagagaaaaaaacctcgaaagcacaagtaataatggtttatcaaaaaataataaagaaattcgaactggagccagcttttcctataaaattatcccttctgtaaaactggtaggagaaatatacaggcaaacaaccaacattgaaaactattatggagagcattctgaagacaaaaaccgcatgttctacaaacttggtataaacaaaacattttaaagccatataaagatattttaatataaatatattatataagtcttatcataattataatgtgtttatgggagatattgcagtaacaaaccttcatatattactattagtatagatttttcatgtcagtctggttcagtcagtgtaatatcaggcacatattttgagagagttaaatattatattaatgaagcgcctatagcaggtgcttcattatatcataagagatgatggctaccttgtgttgataagatacagcataataacgattccatttcatttttgttgtagggttgtttaacaaaaaatcttgctaacgggcttaattgatataagccagatattgtattcctgctatggctacattcatcgcgatgtgaagtaatataggcattaataggccattcgactttatttttgcactaataagaactaacgataccagaaataacatcaaaaatgtacgaaagtatgtatattgtagatgcaatgcagagattataactgatgttacaattgcagggatataaatattatcatggaaccagagtttaaaagagttaaaaagacaccctcgaaatacaatctcttcatatacaggaacaagaaatacagaagaaaatattttaatccataaaattgccccagaaaaagacatttgcgaaactatccactcttccgttttccttactcccagaagataagggacaaataattgaataattattaaagagaggagtgtaaaaaacatacagtcgaaaagaacctcttcctaattcttctctttttcggaagaaaataaaatgcagtgaaacaagaattagaaattcagcaagaaataatgctggaacaagaagccccctggatataagttcctgtttgtttgtaatgaatgcagaaataagagtaatagcgaataataaagtaaacattgaaaaacagctggttgatgactgttttttatagttgcatttttaatttttgttgtttttatttatattcccttacttgtcttcttaaattcttttatataacaggaagaggagaccatagcatgaacgtttcttctccggtatcagaacagctataacttttattttatagttgttatcagtgaatgaatgcaaactaatagaacaatgagaaaaagaatggagaaaaagcgacggaccggacgccatagttcatattctcgtgtatcagcctcacgtatcaacctttctgaaatggtttcggtttcctttcctcgcaccagaatatgcctgtaatatttcctcatgacatataccgaaaactgaaaccagattaatatggatggacacacaacacataaacttctgatgatatcacccgggaaagtatcttgggcgggtaaaagaaagtcatatactctgaataaaatcatcatcgagataaatgagacgccagcacctatccagtattcgatatgagaagatgcagcattatatgtgtcagtaaaatttttctttcttaatgaaggtggaagtgctgaaagttcaggaatgctttttcttgtccagtatattttcatatagcaactcatataaaaagtgttctactatgacgatttataaaaggcttataatgactacttcccctttcattctcgaatatcacgataatgatagagataatcattatcaattgatttcgtcagtaattttgacttatatcacacttttataatttaatcaggtgatttatttaataaaaagagagtgtttgtgggtgtcttgtgtatatgtcttactgggcatctgttcttacattaactaatgtattttctgatatcatactcagtctgaatttataatattaacaaatatattactatttaagttttggttgtattgccagtaacattcttttggttaatttagttattattcctcactgattaattgtccttccgttattattgtttgtaacttgtgtttgtatcgtacctttcaggtgttgatgcgcgctttactgtgtctgcaccggcttaacaaaattcaacagggtttgaaaaggaacatttcgtgcaaataaccgaagcattaatttcagagccgggagacatccagcgttttattcaacaggctgtagatcactgactgcgtctgttggccgtccacttcacgcgtcattcgaccagagtaaatattgatgattactagattcgtgtattttatcaggcattttacttgcgaataaatccccttgttatccagcgaaaccacacaggtagctattaccatatgtcgtaatgcactagttacaggaaaaacatgcaggttccgcaatacgttgtgtgttgctgcttagtcaggatcttttcttccatgcgagatacgacaacacttttgaagaaggatgttcgtaactggtagagttactacaacaggcatgggaggctccggctctgacagacattgtactgtggaatgttgttacaggttggggcggcaaccgtgccaggagaccatgagccgttcacggcattaaaggccacacttcagtcgtttacattccctgtggtggcaggcatcttccgttaaggcgtcagagcgttaccaacgttatgttgtcatggctcacctttcatagtcgatgcttatctggtgactgaaactagccgcagataaagagtgtgaagtttataccatggagtggagtgacgtgcaggcaggagattcgctctatgcagggttgtgagatgaattcaaaccggctgtcagcgccagtgatatttgaagattcgtccggttgttatccagtgtgcattaaaaacccagacattatggacaatacaacggcttccataacagggaggagcctgtttattatccgggcgtaatgactcacccttgtgggctttttcccgtcgcgcttttaacgttgaaggcattttctgcctgccgattcaggacagcgacaaaagccatatcagactattggtcaatgatgaccagcgtctggagtagatgataagccaaattgataagctggaatatgtgatgaaagtgcaacgtaatcagtccaatccgacgatgtttaacaagagtacggtgttttttcagtaagtcattcgtcttctgaatcaggtgtaatgacctttacagaagcattccggcagtgcgtaacataatctgccggtaacggacgatcgctaatcagaacatcaaatgcagagagcggtgcgaggctggcagaggctacttcatcgaacaaggcgtggcgggcgagcaaaattttccttagtccacgggccatcgctttacgcttagtggcaagatcttcgggattaaaccagctgacgccaaagtgatcatgtacaccgctggcggaaataaatatttttcgcggattgagagagtctaatggcgaagagttactggcatcgtaaaaagcatcacttctggcacgatacgtaccaccacaaagtattgctgtcacattaggtttttcattcaacgcaacaaagacacgatgtgagtaacagatgccagtgaaggtgattgcatccgggatcatgcttataacgagcggtatctcctggccattatcaaagaagatcagatcattttcattaaccattccggcggccagaattgcaataggtaagtcatcacgatgatttctcggaacgtcctggattactggcatggatggtgcgggtttatgcaccattacaatatagccacccagtagggtcagtggcagaggttcatcttcctgatggagatcgcgacgaatagtcattacagaaacttccagcattcgtgccgcgtctttcaaatggattctgtcggttttcttaagtatttcaatcaaacgtcggatacgctctttttgcttcgtttccatcaactctctctccgtaaaaatgttataaaaataacattatggcattagtaaacattgttttagttaccatactatacgaccgaccctttgaaatgaaaagggtatagactgctgaattttcggtattaatcctgttaggttgcttatgattagatagtgttggcctgagtgataagactggaagtctattaaataaacatcgggttgatgtgctaatcgcgatctcagtcacaaatgatgcaaaagtaacatgctaatgttatttaaataccattgttatgcgaaagtttataagaggtagtgaaatggacattgcagttattggttccaatatggtggatctcattacttacacgaatcagatgcctaaagaaggagaaactctggaagcacctgccttcaaaatcggatgtggtgggaaaggtgctaatcaagcggtggcggcggctaaattgaattcaaaagtcctgatgctgactaaagtaggtgatgatatttttgcggataatactattcgtaatctcgaatcatggggaattaataccacttatgttgagaaggtcccctgtaccagcagtggtgttgcaccgatctttgttaatgccaactcgagcaatagtatattaataattaagggagcgaataaatttctttccccggaagatatcgatcgagctgcagaagatctgaaaaaatgcaaattgatcgttttacaactggaagttcaactggaaacagtttaccacgcgattgagtttggtaagaaaaatggtattgaagtgttattaaatccggctccggcattgcgtgagttagatatgtcttatgcctgcaaatgtgatttctttatcccgaatgaaacagaactggaaatattaaccggtatgtcggttgatacttatgatcatattcgtttggccgcacgttcgttagttgataaagggctgaacaatattattgttaccatgagcgaaaaaggcgcattatggatgacccgtgatcaggaagtccatgttcctgcattcaaagtaaatgctgttgatactagtggcgctggtgacgcatttattggttgcttttcccattattatgttcaaagcggtgatgttgaagccgctttgaaaaaagccgctctctttgccgctttcagcgtcacagggaaaggtacgcaatcatcttatccgagtattgaacaatttaatgaatttttaaccttaaacgaataatcatcctgcacagttaaaggtagcactatgaacgataaaaacatcattcagatgcctgatgggtatctgaataagactcccttgttccagtttattttgttatcgtgtttattcccgctatggggatgcgcagctgcattaaatgacatattaatcactcaattcaaaagtgtattttcgctaagtaactttgcttcagcattggtgcagagcgcattttatggaggttattttttaattgcaataccagcatcccttgtgattaaaaagaccagttataaggtggcaattttaattggcctgacgctgtatattggtggttgtacactttttttccctgcctcacatatggcaacctacactatgttccttgcagctatttttgcgattgcgattggcctgagtttccttgaaactgcagcgaacacatacagttcaatgatcggtccaaaagcctatgccacattgcggctcaatatcagccagaccttttatccgattggtgctgcgtctggtattttattgggcaaatatctggttttctccgagggggaaagccttgaaaagcagatgtcaggaatgaacgccgggcaaattcacaactttaaggtgctgatgttagagaacacccttgaaccgtataagtatatgattatgattctggttgtggtcatggtgttgttccttttaacccgcttcccaacctgtaaagtggcacagacaagtcaccataaacgcccgtcagcaatggatacgctgcgctatctggctagaaatccgcgctttcgtcgcggtattgtggcgcagttcctttatgtgggtatgcaggtcgcagtatggtcatttaccattcgtctggcgctggagttgggcgatatcaacgaacgtgatgcttcaaacttcatggtctatagctttgcctgcttctttattggcaagtttatagccaacatccttatgacgcgttttaatccggaaaaagtattgattctctattccgttataggggcgctgttcctggcatatgttgcactggctccaagtttcagcgcggtctatgtcgccgtcctggtaagtgttttgtttggcccttgctgggcgacgatctatgcaggaacactggatacagttgataacgaacatacagaaatggcaggagcagtcattgttatggctattgtcggtgccgcggtggttccagcaattcagggatatattgcagatatgttccactcactacagctttcattcctggtttctatgctctgctttgtctatgtcggagtctacttctggcgtgaaagcaaagtacgtaccgcactggctgaagtcacagcgtcctgaggagaaccgttatgagtacgcgtattaatttgtggcgggcgctttttggcgagaaacctcgtatcttgctggaaaatagtgattttactgtcacgtcttttcgctatgacagcggtgtcgaggggcttaaaattgcaaacagtcgtggacatttgattattcttccctggatggggcagatgatttgggatgcgcaatttgatggacacggcctcaccatgtgcaatatgtttcgccagcctaaaccggcgacagaggtgatagagacctatggctgttttgcttttcattcaggtttgctggctaatggctgcccatctgcggaagatactcatctgctacacggtgaaatggcctgtgccgcgatggatgaagcatggctggaattagacggagatatgttacgccttaacgggcgttacgagtatgtaatgggtttcggtcatcattatctggctcaaccaacagtggtccttcacaaatcctctacactgttcgatattaagatggccgtaaccaatctggcttctgtagatatgccactacaatatatgtgccacatgaattatgcatatataccaaatgctacattcagccagaatatcccggacgaaatattaagattgcgtgaatcagtgccttcgcatgttaatcccaccgctcagtggctggcgtttaatcaacggattatgcagggagaagcctctctgtcgacgctgagtcaaccggaattttatgatccagaaattgtcttctttgcagacaaactggacgcttatacagatcagccagagtttcgcatgatctctcccgatggcactacgtttgttactcgtttctacagtgctgaactaaattatgtgacacgctggatcctttataacggagagcaacaggtagccgcctttgcattacctgcaacctgtcggcctgaggggtatcttgccgcgcaacgtaatggcacgctgattcaggttgcaccgcagcaaacgcgcacttttacagtcaccacaggaattgaataaccactcaaggcctgaacagcggcgcgcttatcgttaaggtaagcgcgcttttttacccgccaggacaagactatgatagcgttgcccttatagacgatcacattatcgtccactccaaatttgcgcaactactgtagagtggtgtactccacagcttctttgaggatctcaacttccattgttttcttaccgagcaagcactgcaactcttttatttatttgtagtggtcaacaaaaactggtcacaatttcagtttttttccagtatctattttccgattcgttcggcggtaatccaccgttatattcatgaggccggagtgcactataaaagtgtatgcgtaaaccgactgctgtatgtagccattaagccagtattggtaacataggtacccaccttttcaactagtggacacctgttatggaacaaaaaacattatcagctgaaccccgcaggtcattttcaaatgagtttaaacttcaaatggttacactggctttacaaccaaggggttctgttgcccgtattgcccgggagcatgatatcaatgataatcttctgttcaaatggctcaggctctcgctgatcaaagggcgtatatcacggcgtcttccgttaacgaactcttctggcattggcgttgaattattacctgtggagatgacgctgggatgagcggccttaccccgttttttacgcgaggtaattatgaagatcaatgactagccgtcgaaccgtgtgcatgaactgctgcactgaaacttctcagctgtaaaataatccttacgctacgtacttctcggagcgcttacaattaatcggatgcagtcctgactggaagaaagaaaaatggagaaaacaagaggaattaatatcctccacgttcctgaaatcctggaggatattaatgtcatcaaaatattagcgaacgataatccctaacaaaatacccagtgcgccaaagtcagcatcactgaaggtggtgttagcaaaaccaatatcacccagcaccggcaataagaatactggcaggaaggtaataagcaagccttgagcgaaggcacccaaaatcgcaccacgacgtccacccgttgcattaccgaatacccctgcagctgcacctacgaagaagtgcggcaccacaccaggaataatcacgatcatgttcagcagatacaacgtgaacataccgattaaacctgcagcaaagctactcaggaaaccaaccagtacagcgttaggtgcgtaagggaagacgaccgggcaatcgagagcaggtctggcattcggaaccagcttgtctgaaatacctttgaatgccgggacaatctccgcaatcaccatgcgcacaccctgcagaatgatgtacacgccagctgcgaaggtaatggattgcatgatagagaacatgaaccagtttttaccaccgctaagctctttcaccgcatctgcacccgcaaacaggcacgtcaccaggaaaattatgctcatggtaaaagagatagcaaccggcgtgtcgcgcaagaacagcagacttttcggcacattcatgtcttcagtcgagtgctctttattaccaaacttgctgccgatgaaaccggccaatacataagataatgttgagaagtggccgatggcaacgtcatcagaaccggtcactttcttcatgtacggatgcgcaatagccgggaaaaagaccattgccacgccaacaaccaaagagccaacggctataagcgtaacgccggtcatgcctgctgttgccagaattaccgctaccatcatcgacataaacaacgtgtgatgaccggtcaggaagataaatttccacggtgtgaaacgggcaatcataatgttgataaccatcgcaaagaacataatcatcgccatttctttcccgaagcttttctgcgctacggaaacaatggcttcattgttcggcacgacaccctgaataccaaaggcatgctggaaaatgtttgcgaagtcacccagtgacgacacaactaaacccgcccctgcgcctaaaatcacaaaccccataatggtcttgacggtacctttaatgcattcggttaccggttttttctgtgcaatcaggccaatcagggcgattaaaccgaccagcaccgcgggttcggaaagtacatcgctcatcaaaaaacgaaagaaatccatatcgcccccagcttacagtgcgcctaattcggttaatgccacggacaaacgttctctcatggctttcttatcaatcatattttccagggcgacgattttgcctgcgacagactgcgcgactaactgctcggcaatatctttggtgccgacatagatatcactcggcgtccctttcgcggagcccaggtcgacatgatcaacatcagcgctgatggacaaatccttcaaaatgcttttaatgctcatttccatcatcaggctggtgcctaagccgttaccgcaaaccactgtaattttcataaatgttcctcagaattaatagcgcgcaataacagacaaaatgtcctgcgtcgttttggccgtcaaaatagcctgtatgtctttttcgttatcgaataacttggcgagttgagaaatcgcttcaatgtggctggtactgtcggttgcagccagcacaatcagtaatttcactggatcgttttcatcggcatcaaaattcacacctgaagggatcagggtcagtgctaatgacagcttgttagccccctcttccgggcgcgcatgaggcatcgcaataccagggccaaccacatagtacggaccgatagtgtcgtgcgagtgatagatcgcatcaacataacgcggttcgatagaaccgttttcaatcaacggtcggcatgaaatcgccacggcttcccgccagtctttgacctgttccacgacctgaacgacctctgtatttaatagattttttaacatacgactgataactcccgatgataattaacaggagagtagatattttacgcattaattaatgtgatgattgtcgcatttgatagcgctatctgataacgctaccaatctttgtgatagcgctatcatttctctgccgccatgctttggctatattcggttcctgcatatacaatgcaacaggatatttgctaccgtgggcaaaaactggaaagagtaatggtaaaataaaagtaatgaaaacagctggttgtaattatccatggagtcgaaatggaaaaaacacgtaagcgccgtggtaccggacgggtgacgctgcaggaggtcgctaactttgcaggtgtcggaaccatgaccgtctcccgcgcgctgagaacaccggaacaggtttctgacaagctgagggaaaagatagaacaggccgtagaagagttgggttatattcccaacagaactgctggcgcccttgcatctggtcacagtcatacagtcgccgtactggttccttccctgacagataaagccagctcccgctttatgcagtcgttgcagcaggtgcttaataaaaatgaattccagctactgcttgggtgtcatgagtataatcagctcaaagaagctgaaattctgatgacgcttcttcaaggcaacccggcggcgttagttatttttggttctcagttggctgataaaactcaccagatactcgagaaaacaaatatacctaccgttaacgttgtcggttcccctttcagtccggctcaaattaccatcgaaacagcattttttgaagcatcacataaactgaccgaacatctgctggagcagggttataagaatatcggatttatcggtgcgcatatggaaaaccgcctgcaacgtcagcaactgaacggctggcataaagcaatgctgagccattaccagaacactgatcttgttatcacaatgccggatgccgcaagtctgcaattggggcgttacgcattaaacgagatattactgcgacaaccagagctggatgctgtgatttgcagccacgaagagattgcgctgggtatcatgtttgagtgtcagcggcgtttgttaaaaatccctggaaatatcgctgtagcttgtcttgacggttcagacagttgcgatcaaacacacccaaccttgacatccatccgtattgactacaaaaaaatggggatagagacgggtaagttactgattggactattgaataataatcatgatgaatcagaagagtcgcgtatcgtgcaattcaactaccagatagaattacgtcagagtacatgagcctaaaagggcactattgcaaagttagctattgtggtagggatagccgtttccggctattccccgcgcagatccggatgtgtgctgctaacgcatccattcctacttcaggtatttggcgtagaagcggatgctaaaaacttgccgtaaaaccgcaatatcagcccgcagtgtcgctctccagattatccattcctatattgatgacaacgacacgtaagactgtgactcaccaaacttggatgtttttctgagcttaaagctcgttgcgtgaataaggcgagagtcagcgaatctcatcgaggcccgcagcaccggctgcaatagggatatagagcagcaatctaccgtcaacgtcaaaaacacggaagccttgcaaacgggatgcgttcatataaacaacatggagcagcaacaatacgatgcctgttgttgctcagtcaggaccttttctgccatgcgcgagccagcgtcacgattgatgaagaatgttctcaactgattaatttactgcaacagacgtggctggtaataagcgctggcggacaatgcagggtgaaaggctgttttcgggttgtccggcctgatacatcagagcaatacgttgcgttaaaaacggctgttcagtctctgatgccacggggtattgcaacaatcatccggtgatggacgggagaaatatcgactcttccgttagtttttacagactgataaagttttgccagctgaatctttatacggaatgctcttcagtatgcatatacgaattgactatctggcggataaaaactgctttacagaactgaatgaatctccacgccttcgccggcagtggcaggatgttctggaggagtgccggcagacagaggccgggccagaagaacggctgcgtattgctctgctgaatgtggattacgtcaccagttttgaactgccttttcgcttgttgcttactcgtacaccacaactgattgccgcgctgcgtgaagaatgggacatcagccagaaaaatgtggtgttcaacgataaacgctttggctgcgtgtacaacctgaaggccagcctttcgggtgggccggatacattccggtatcatctgtctcaccgtattcggcgggtggttgcgaatgaaaacacatcatcgccataccaactgattgcccgggaagtgaaagcgccccgtcaacggctgaagtatgcgctggagacaggattgcaggtgagcgcactggacggcctgttctggttcggcagccagcgcattgcggcagatatcctgaggctgagaaagtacgggatgcggattgcgacggcttctgtggacgtgtatgacaacataaccggaacaactcgtcatatccctgtatattactcctgacgcaaaatagtctgtgggggccggagcatgaccggtaaccggaacagggttttgccctcgtcacagccaaaaatacgtcctttatcacatttcttcgatttttcctgatattttaccgggttactgttcaaaaatgcttctcttctgatgtaaatttctttactgacactttttgacatgaatttacactggcatcacacaggccagaatacggggagaacatgcagcaccggcagaaaaacattctgacgaaaacgtcccttttatcccgtgcgttgtctgtcccctgttgtgatatgttccggcgcggctctccgtggatatgctatctctccctctccgttttttctggttgtttcatccccgcattttcgtctccggcagccatgctgtctccgggtgaccgcagtgcaattcagcagcaacagcagcagttgctggatgaaaaccagcgtcagcgtgatgcgctggagcgcagtgcgccgctgaccatcacgccgtctccggaaacgtctgccggtactgaaggtccctgctttacggtgtcaagcattgttgtcagtggggccacccgactgacgtctgcagaaaccgacagactggtggcaccgtgggtgaatcagtgtctgaatatcacggggctgaccgcggtcacggatgccgtgacggacggctatatacgccggggatatatcaccagccgggcctttctgacagagcaggacctttcagggggcgtactgcacataacggtcatggaaggcaggctgcagcaaatccgggcggaaggcgctgaccttcctgcccgcaccctgaagatggttttcccgggaatggaggggaaggttctgaacctgcgggatattgagcaggggatggagcagattaatcgtctgcgtacggagccggtacagattgaaatatcgcccggtgaccgtgagggatggtcggtggtgacactgacggcattgccggaatggcctgtcacagggagcgtgggcatcgacaacagcgggcagaagagtaccggtacggggcagttaaatggtgtcctttcctttaataatcctctggggctggctgacaactggtttgtcagcgggggacggagcagtgacttttcggtgtcacatgatgcgaggaattttgccgccggtgtcagtctgccgtatggctataccctggtggattacacgtattcatggagtgactacctcagcaccattgataaccggggctggcggtggcgttccacgggagacctgcagactcaccggctgggactgtcgcatgtcctgttccgtaacggggacatgaagacagcactgaccggaggtctgcagcaccgcattattcacaattatctggatgatgttctgcttcagggcagcagccgtaaactcacttcattttctgtcgggctgaatcacacccacaagtttctggggggggtcggaacactgaatccggtattcacacgggggatgccctagttcggcgcagaaagcgaccacgggaaaaggggagacctgcccgtaaatcagttccggaaatggtcggtgagtgccagttttcagcgccccgtcacggacagggtgtggtggctgaccagcgcttatgcccagtggtcaccggaccgtcttcatggtgtggaacaactgagcctcgggggtgagagttcagtgcgtggctttaaggatcagtatatctccggtaataacggcggttatctgcggaatgagctgtcctggtctctgttctccctgccatatgtgggaactgtccgtgcagtggctgcactggacggcggctggctgcactctgacagcgatgacccgtactcgtccggcacgctgtggggtgctgctgccgggctcagcaccaccagtggccatgtttccggttcgttcactgccggactgcctctggtttacccggactggcttgcccctgaccatctcacggtttactggcgcgttgccgtcgcgttttaagggattattaccatgcatcagcctcccgttcgcttcacttaccgcctgctgagttacctggtcagtgcgattatcgccgggcagccgttgttaccggctgtgggggccgtcatcaccccacaaaacggggccggaatggataaagcggcaaatggtgtgccggtcgtgaacattgccacgccgaacggggccgggatttcgcataaccggtttacggattacaacgtcgggaaggaagggctgattctcaataatgccaccggtaagcttaatccgacgcagcttggtggactgatacagaataacccgaacctgaaagcgggcggggaagcgaagggtatcatcaacgaagtgaccggcggtaagcgttcactgctgcagggctatacggaagtggccggcaaagcggcgaatgtgatggttgccaacccgtatggtatcacctgtgacggctgtggctttatcaacacgccgcacgcgacgctcaccacgggcaaacctgtgatgaatgccgacggcagcctgcaggcgctggaggtgactgaaggcagtatcaccatcaatggcgcgggcctggacggcacccggagcgatgccgtatccattattgcccgtgcaacggaagtgaatgccgcgcttcatgcgaaggatttaactgtcactgcaggcgctaaccgtgtaactgcagatggtcgtgtcagagccctgaagggcgaaggtgatgtgccgaaagttgccgttgataccggcgctctcggtggaatgtacgccaggcgtattcatctgacctccactgaaagtggtgtcggggttaatcttggtaacctttatgcccgcgatggcgatatcaccctggatgccagcggcagactgactgtcaacaacagtctcgccacgggggccgtcactgcaaaaggtcagggcgtcaccttaaccggcgaccataaagcgggaggtaacctgagcgtcagcagccggagagatatcgttctcagcaatggaacgcttaacagcgacaaggacctcagcctgaccgccggcggcagaatcactcaacagaatgaaaaactgactgccggccgggatgtaacgcttgccgcgaaaaacatcacacaggataccgccagccagattaacgcggcccgcgatatcgtgactgtcgccagtgacacgctgacaacacagggacagataaccgccgggcagaatctcacggccagcgccaccacgctgacgcaggacggaatattgctggcgaaaagtcatgcgggactcaatgccggtacgctgaataacagtggcgccgttcagggagctaccctgacgctcggcagtacaacgctcagcaacagtggctccctgctcagtggcggtcccctgaccatgaatacccgcgactttacccagagcggccgcactggcgcgaagggcaaagtggatatcatggccagtgggaaactgaccagtacaggtttgctggtgagcgatgatgcactggtgctgaaggcgcaggatgtgacacagaacggtgtgctgtccggcggcaaagggctgacggtcagtgcgcagacgctgagctccggtaaaaaatcggtcacccacagcgatgctgcgatgacgctgaatgtgacaacagtggcgctggacggggaaaccagtgccggtgacaccctccgggttcaggcagacaaactgagtaccgcagcgggcgcacaacttcagagcggcaaaaatctcagcatcaacgccagagatgcacgtcttgcaggtacgcaggcagcacaacagaccatggtggtgaacgccagtgaaaagctcacccacagcgggaaaagcagtgccccgtcgctcagcctcagtgcgccggaactgaccagcagcggcgtacttgttggttccgccctgaatacacagtcacagaccctgaccaacagcggtctgttgcagggggaggcctcactcaccgttaacacacagaggcttgataatcagcagaacggcacgctgtacagtgctgcagacctgacgctggatataccggacatccgcaacagcgggcttatcaccggtgataatggtttaatgttaaatgctgtctccctcagcaatccgggaaaaatcatcgctgacacgctgagcgtcagggcgaccacgctggatggtgacggcctgttgcagggcgccggtgcactggcgcttgctggcgacaccctctcacagggtagtcacggacgctggctgacggcggacgacctctccctccggggcaaaacactgaataccgcagggaccacgcagggacagaatatcaccgtgcaggcggacagatgggcgaacagtggttccgtgctggcaaccggtaaccttactgcttcggcaaccggtcagttgaccagtaccggcgatatcatgagccagggtgacaccacgctgaaagcagccaccacggacaaccggggcagtctgctttcggccggcacgctctcccttgatggaaattcactggataaccgcggcactgtccagggtaaccatgtcacgattcgccagaacagtgtcaccaacagtggcacgctcaccgggatcgccgcactgacgcttgccgcccgtatggcatcccctcaacctgcgctgatgaataacggaggttcattgctgaccagcggcgatctgacaatcaccgcaggcagtattaccagttccggacactggcagggcaaacgggtgctgatcaccgcagacagtctggcaaacagcggggcgatccaggcggctgacagcctgactgcacgtctgacgggtgagctcgtcagcacagcgggcagcaaagtcacctcgaacggtgaaatggcgctcagtgcactgaatttaagcaacagcggacaatggattgcaaaaaatctgaccctgaaggcgaactcactgaccagtgcgggtgacatcaccggtgtggatactctcacgctcacggtgaatcagacgctgaacaatcaggcgaacggaaaactgctcagtgcaggtgtgctgacgctgaaggcagacagtgtcacaaacgacgggcaattacagggaaatgtcaccaccatcacggcaggacaactcacaaacggcgggcatctgcagggcgaaacgctgacgctgacagcctccggtggcgtgaacaaccgttccggtggtgttctgatgagccggaatgcactgaatgtcagtactgcgaccctgagtaaccagagcacgatacagggtggaggcggggtttccctgaacgccacagaccgtctgcagaacgacggcaaaatcctctccggcagtaacctcacgctgacggcgcaggtgctggcgaacaccggcagcggactggtacaggctgccaccctgctgctggatgtggtgaatactgtcaacggcggacgcgtacttgccaccggcagtgccgacgttaaaggaaccacgctgaataataccggtacgcttcagggtgcggacctgctggtgaattaccacacattcagcaacagcggtaccctgctgggaacctccgggcttggcgtcaagggcagttcactgctgcaaaatggtacagggcggctgtacagtgcaggcaacctgctgcttgacgctcaggacttcagtggtcaggggcaggtggtggccaccggtgatgtcacactgaaactgattgctgccctcacgaatcatggtaccctggccgcagggaaaaccctttccgtcacgtcgcaaaatgccatcaccaacggcggtgtcatgcagggtgatgccatggtgctcggtgccggagaggcattcaccaacaatggaacgctgactgccggtaaaggcaacagtgttttcagcgcacagcgtcttttccttaacgcaccgggttcacttcagggcggtggcgatgtgagtctgaacagccggagtgatatcaccatcagtggttttaccggcacggcaggcagtctgacaatgaatgtggccggtaccctgctgaacagtgcgctgatttatgcggggaataacctgaagctgtttacagaccgtctgcataaccagcatggtgatatcctggccggcaacagtctgtgggtacagaaggatgcttccggcggtgcaaacacagagattatcaataattccgggaatattgagacgcatcagggcgatattgttgtaagaaccgggcatcttctgaaccagcgggagggattttctgccacaacaacaacccggactaacccctcatccattcagggaatgggaaatgctctggttgatattcccctttcccttcttcctgacggcagctatggctatttcacccgtgaagttgaaaatcagcacggtacgccctgcaacgggcacggggcatgcaatatcacaatggatacgctttattattacgcgccgtttgctgacagtgccacacagcgctttctcagcagccagaacatcacaacagtaaccggtgctgataatccggcaggccgcattgcgtcagggcgtaatctttctgctgaggctgaacgactggaaaaccgggcgtcatttatcctggcgaatggggatatcgcactctcgggcagagagttaagcaatcagagctggcagacggggacagagaatgaatatctggtataccgctacgacccgaaaacgttttacggtagctatgcaacaggctctctggataaactgcccctgctgtcaccggaatttgaaaacaataccatcagattttcactggatggccgggaaaaagattacacgcccggtaagacgtattattccgttattcaggcgggcggggatgttaagacccgttttaccagcagtatcaataacggaacaaccactgcacatgcaggtagtgtcagtccggtggtctctgcacctgtactgaatacgttaagtcagcagaccggcggagacagtctgacacagacagcgctgcagcagtatgagccggtggtggttggctctccgcaatggcacgatgaactggcaggtgccctgaaaaatattgccggaggttcgccactgaccggtcagaccggtatcagtgatgactggccactgccttccggcaacaatggatacctggttccgtccacggacccggacagtccgtatctgattacggtgaacccgaaactggatggtctcggacaggtggacagccatttgtttgccggactgtatgagcttcttggagcgaagccgggtcaggcgccacgtgaaacggctccgtcgtataccgatgaaaaacagtttctgggctcatcgtattttcttgaccgcctcgggctgaaaccggaaaaagattatcgtttcctgggggatgcggtctttgatacccggtatgtcagtaacgcggtgctgagccggacgggttcacgttatctcaacggactgggttcagacacggaacagatgcggtatctgatggataacgcggccagacaacagaaaggactgggattagagtttggtgtggcgctgacagctgaacagattgctcagcttgacggcagcatactgtggtgggagtcagtcaccatcaacggacaaacagtcatggtcccgaaactgtatctgtcgccggaagatatcaccctgcataacggcagcgttatcagcgggaacaacgtgcaacttgcgggcggcaatatcaccaacagcggcggcagcatcaacgcacagaacgacctctcgctcgacagttccggctatatcgacaacctgaatgcggggctgataagcgcgggcggtagcctggacctgagcgccatcggggatatcagcaatatcagctcagtcatcagcggtaaaaccgtacaactggaaagcgtgagtggcaacatcagcaatatcacccggcgtcagcaatggaatgcgggcagtgacagccaatatggtggtgtgcatctcagcggtacggacaccggtccggttgcgaccattaaaggcactgattcactttcgctggatgcagggaaaaacattgatattaccggggcaacggtctcgtccggtggagaccttggaatgtctgcgggtaatgatatcaacattgccgcaaacctgataagtgggagcaaaagtcagtccggtttctggcacactgatgacaacagttcatcatccaccacctcacagggcagcagcatcagcgccggcggtaacctggcgatggctgcaggccataatctggatgtcacggcatcctctgtttctgccgggcacagcgccctgctttctgcaggtaacgacctgagtctgaatgcagtcagggaaagcaaaaacagtcgcaacggcaggtcagaaagtcatgaaagccacgcagctgtgtccacggtgacagcgggcgataacttcctccttgttgccggtcgtgatattgccagtcaggctgccggtatggctgcggaaaataacgtggtcatccggggcggacgtgatgtgaacctggtggcagagtctgccggcgcaggcgacagctatacgtcgaagaaaaagaaagagattaacgagacagtccgtcagcagggaacggaaatcgccagcggtggtgacaccaccgtcaacgcaggacgggatatcaccgctgttgcgtcatccgttaccgcaaccggcaatatcagcgtgaatgccggtcgtgatgttgccctgaccacggcgacagaaagtgactatcactatctggaaacgaagaaaaaaagcggaggttttctcagtaagaaaaccacccgcaccatcagtgaggacagtgccacccgtgaagcaggctccctgctgtcggggaaccgcgtgaccgttaacgccggtgataacctgacggtagagggttcggatgtggtggctgaccgggatgtgtcactggcggcgggtaaccatgttgatgttcttgctgccaccagtacagatacgtcctggcgctttaaggaaacgaagaaatccggtctgatgggtaccggcggtattggtttcaccattggcagcagtaagacaacgcacgaccggcgcgaggccgggacaacgcagagtcagagtgccagcaccatcggctccactgccggtaatgtcagtattaccgcgggcaaacaggctcatatcagcggttcggatgtgattgcgaaccgggatatcagcattaccggtgacagtgtggtggttgacccggggcatgaccgtcgtactgtggacgaaaaatttgagcagaagaaaagcgggctgacggttgccctttccggcacggtgggcagtgccatcaataatgcggttaccagtgcacaggagacgaaggagagcagtgacagccgtctgaaagccctgcaggccacaaagacagcgctgtctggtgtgcaggccggacaggctgcgacaatggcctccgcaaccggtgacccgaatgcgatgggagtcagcctgtcgctcaccacccagaaatcgaaatcacaacaacattctgaaagtgacacagtatccggcagtacgctgaatgccgggaataatctgtctgttgtcgcaaccggtaaaaacaggggcgataaccgcggagatattgtgattgccggaagccagcttaaggccggtggtaacacaagcctggatgccgcgaatgatattctgttgagtggcgccgcaaacacacaaaaaacaacgggcaggaacagcagcagtggcggtggcgtgggtgtcagtatcggtgccggtggtaacggtgccggtatcagcgtctttgccggcgttaatgcggcaaaaggcagcgagaaaggtaacggtactgagtggactgaaaccacaacagacagcggtaaaaccgtcaccatcaacagtggtcgggatacggtactgaacggtgctcaggtcaacggcaacaggattatcgccgatgtgggccacgacctgctgataagcagccagcaggacaccagtaagtacgacagtaaacagaccagcgtggctgccggcggcagttttacctttggctccatgaccggctcaggttacatcgctgcctcccgggataagatgaagagccgctttgactccgttgctgaacaaaccggaatgtttgccggtgatggtggcttcgacattacagtgggcagacatacccaactggatggtgcggtgattgcctccactgccacaccggataaaaaccacctggataccggaacgctggggttcagtgaccttcacaacgaagcggattataaagtcagtcacagtggaatcagtctgagcggtggtggcagcttcggggataaatttcagggtaacatgccgggtggcatgatatccgccggaggtcacagcggacatgcggaaggaacgactcaggccgcagtggcagaaggcactatcaccatccgggacagggacaatcagaagcagaatctggcgaacctgagccgtgaccctgcgcacgctaatgacagtatcagcccgatatttgacaaggagaaagagcagaggcgtctgcagacagtggggcttatcagtgacataggcagtcaggtggcggatattgcgcgtacacagggagaactgaatgcgttgaaggccgcgaaggaagcaaccggcgaaacacttcctgctaatgcaacagagaaacaacgtcaggaatatcttgcgaaactgcgtgacacgcaggcttacaggaatgaaatggcgaagtatggtaccggcagtgaaattcagcggggtatccaggccgcgacagcggcgcttcaggggctggcggggggtaatttagcaggtgctctggccggagcttcagcaccggaactggcacatctgctgaaatcaacagaaaaagacccggcagtaaacgccattgctcacgccattctgggcggcgcagtggcggcaatgcagggtaataatgtcgctgccggtgcagcaggcgcagcaacgggagagctggcagccagagcgattaccggaatgctgtatcctggcgtgaagcagtcagacctcagtgaagagcagaagcagacgataagtacgctggcaactgtgtcagcagggctggcctgcggtcttaccggaaacagcaccgcatcagcagcagtgggagcacaaagcgggaagaatgctgttgagaataactcactcagtgatggctggaacaatatcctgccatcaggaacacaggattacggacaggccgtagcctcgtggaatcagtatgctcaggacaataatctgacaccggagcaggttcaagaagggatgaatcgtatagctattggtgaagggccttcttgggggacaacatataaagtacacccggtagttcaggctggcggtgatgttagctttatccggggttatactttaagcggaactatagatgacaatcatatttcagttaatcaaggggatatttatagtataggtgctcatggcggagcctcgatcggattatcctttggcccgtatttcccgggattaataaattcaaatgataacgattattcgataaatggtggttttggcgttggtgcagtggggctttctacgggtaaagatggtgttagtttcacttttggttttggcccaagttggggttggagtgcaactgaaattaaaggcgttgacgttaatggcacttcaacaagtgaggtttatcgatatgattttaaataatttctatagtttactatttttattgatgcttgcgctgtcaatattttccttcacagtgctatttgctttgtttatatataaagatctcggtggtgtaaaatttgcccgggactcttttttgttttttgattatatattttttagttctgacatgagagcaaatgcctctgcactatcggttatctgtgtttttatatttggattggcttttgatcataatcgtaatccacttgttaagaattacttgatcgatatagtatggtttttaggtgttgttttattttttatacactgtcgttttttttctaatctggaatatggtaagacaaaaattatttttgtaagagagctttttttcaacctaaaaataaaactaaggttaatatttttatggttgtcacgattattattcatcatattgatattaaatcgtttttatcgttgatttgttgttgagaataatttacttggcggtagtgaatatgctcattctgcgtggatacgccagcatggtatcgacatggcgacatgtacagaaaactcttccggtgccgcctgccagaaagcaatgaatgagagggatgctgtagggctggctctggcaacaggtactgtggcactactccccggtagtgctcaggctatgtggggacttggagcaagtgcgaatgctggtatcagttatctggctgatggtactgtagatccggcaaacgcagccattgcaggctggggtgaatgtgttcagcatgggtaatggcctagcggggactgtgggctggaatgctgcaggtggtgcgctgggtaactggatcggcaacaaagatcctctgtctggtgcaatttcaaatggtatcggttctgctgctgggtatggtatcggtaaaggtattacttaggggacagataagattacgaatgctgtaggaaaatgggtgacaaatggctgggatcctaagtacgatccaacatggataaaatatgctgaagtaaatcgtaacgatatcattcgagaaggcatgaaaccgagcaatattcctggaactgctggagatattggcggttctataggatccgagctaggtggaaaagtaacagataaagtatctgaggaactcaagaaatgaaatattcttttcgagtggtaataggtaagtttattatatgcagttcaattctcttattgtgttttattggcatgatcttagcggccataataactaaactaacgtttgtagcgttagcatggtttcaaagcgggatttttgaagttttgtggagcgatattgtttatgctgctcagttgggtggtctgggggggggggcatattaggtttttgttgggttttgttatatctttttagggcaaagggctttagttgagaataactacctgagcgtgtctgaaaagacagaacttgagatagcaaaacagacgcttaaaaacagtaaagatccggcagaacgtgaaaaggtacagcagaaatatgatgcattgcttgaaaaagatattgccagtgataaggaggttattgctgcctgcagtaatggtaatgcggggagttcagcgtgtgctagcgcaaggctgaaagttattgcgtcgaaagaagggtacgaagatggcccttataagagactgtaattaaaattgtgtaattgcctgtttttgatatgttcactccaacaacggagacaggcaaacgatggacgaaaagaaacttaaagcccttgcggctgactggccaaaggccttaaaaccgaagccgacctcaaccagttttcacgcatgttgacaaagcttaccgtcgaaacggcgctcaatgcagaactgactgaccatctcggtcatgagaaaaatgctcctaaatcaggctctaatacccgtaatggctactcgtcaaaaacggtattgtgcgatgatggcgagatcgaacttaacacgccgcgtgaccgtgaaaataccttcgaaccgcaactaattaagaagcatcagacacgcatcacccagatggacagccagattttgtccctgtatgccaaaggcatgactacgcgggaaatcgttgccacgttcaaagaaatgtacgacgccgatgtctcgcccacgctgatatccaaagtgaccgatgcggttaaagagcaggtctctgaatggcaaaatcgaccgttggatgcactgtatcccattgtttatcttgactgtattgtggttaaggttcgtcacggcgggagtgtcattaacaaagcggtgttcctcgcgctgggcatcaataccgacggtcagaaagagctgctgggtatgtggctggcagaaaatgaaggtgcaaagttctggctgggtgtactgactgagctgaaaaatcgtggccttcaggacatcctgattgcctgcgtggacggcctgaaaggcttcccggaagcgataaatagcgtgtacccgcagacgcatattcagctctgcatcatccatatggtgcgcaacagcctgaaattcgtgtcgtggaaggattacaaagccgtcaccagcgggctgaaagcggtatatcaggccccgacagaggaagcggcgttgatggcgttggataagtttgcaggcgtctgggatgaaaaatacccgcaaatcagcaagagctggcgcacacactgggaaaatctcaacaccttcttcggttacccaccggatatccgcaaggccatctacacgacgaatgccatcgaatcgctgaacagcgtcattcggcaggcgataaagaagcgcaaggtgttcccaacggacgactcggtgcgaaaagtgatttatctggcgatacagtcggcgtcaaaaaaatggagtatgccaatccagaactggcggctggcaatgagccgttttattatcgagtttggtgaccgccttagcgagcacctttaatacggcggcagttacacagaattatttacagggtcgactgggaacatattcaggcagtgtatctgaatccagaaaagaaacagcataatgtaattttattacaaaaggcgacaattagcttgaaaaacgccgttattgggtgttctactaccatgaaaatacgcatttttcacaccgcacattacgaaactcgcatcacggagaatgaaagctatcagacactggttgctatttttgaccacagaaggtagtgctgtttaccgccagagctgtgctggcggggagcgaatccgaaccatgtcgataattgtcaccggccagagaactatgtggcatcaattttgctgaaaaatactgcagcaatcagaggactgacgcccgggatttttaaacaaattcagttttcatcgtagtatcactttatcagccaagtcataaagttcagctgtattttgggaggtaaagcgatattatgattatattttatgtttgatagaaatatttcagggcagatacaataccatgggtataattcagttttttcagacacaaacaaaaataactattggatacattatttctgtcacagctttcttgttttgagtaaccataaaccaaatattctctaagagccactattgttttttcacttctgattggtgatatttcaatcagaagcgaaaagtgctcatcatttacacttgctcgttgtaatcctgaattatatgttttttttgcataagaagaataacgcatatacacactcaccaacttgtatttataaaatcattttgtaattcattatgtaatgaaatcaccttactccccttcaagttataagacatgaaagaataatttttttgcaatgtaagtttttacaaaacatgaataatatattcatggctcatacagaactaccataagaaggatgattaagaaaatactgttttatattttaagaatctctgagaaaggctgccttccggcagcctttcccccacatcagaacatataccggaaatttgcgtttaccgcattatccacgttatatttaccaaaggctgacttctcaaactccagaccaaagcgcatattgtcctttatctgcgcattcataccaacattaaacagcatccggctgtctttctcgccttttatccgtttctccccggacgcatcacgcagtaccgtctcaccattattcagtaggtcaaactgccagctggtcccggcacgggccgtcacactccagtccttaccactgaaggtcttgcccagttcaatccctgttcttccaatcagcggactgaagtccctgttcttcatgctcaggtccatatcaccgtctttccagcggaatgttttcccggacacggcgccgtaaaccagttcagcctgcggctcaatgaacgtttcctctgtcaggtgatagcggtaacccgtttcagcaccggcataccaggaatgggtgttgtagtgtttcgttcccagaccggcaaagttacctgtgtaatcattgtcatggtgaatatatttaccaatcaaatcgatataggcaccggactcaaacaatgctgaagcatacagaccgccccccaccgatttcgtcttgccgctgaacgcatggctgtctgcactgctgtcggtataggtcatcgtgacaccggtaaacaggtccactccgtccagttcatgttttttgtcaaagccgacctgaacatgggtgtaattatcactgtaaccaccgtctgcagaaccggcaccactcatgatgcgcgcccaggctccggcatcaccgtttgtgtcacgcaggtcacccatacgtttgttcagattgttgacttccgtcatgaagtttttatacccggcattcatgaaactgtcagccttcgcggcagcggctttatcagcctccgctttaaaaccgtccagtatccacttcgtattgccaccactggtgtcaacatgcagggttggagtcacccgactgaaacctatcatccgggtgccggccttaaacatctctgctgaagttcccgccggtgccgtgaccagaggaatattcagggactgtccctgagccggatccttcataaagctgacgttcaggctgttatctgaacccgtggctttttcagtcacattaattttatcggcatttttcaggtccgtacgcagaacaaaatcactgcctgttgcatccagtttattcaccgtcagggtacggaaagtacggtctccttcagaactgatacggctgtttctgacggtaagagtgtggatggcggagtccccacccagagtccacagtgcattatgcatactgacatcagccctgccaccggttatggcaccattgaatgctgcgttatagccctcaagaagactgccggcaaacgccgatgcagtcgtttccgcagaagccagttctgccggcgtgtcagacccgatggtaactgttgatgccgcagaggcatgaatatcaccggaagcatgtgctccacgggtaatttccagtgttgcgttatcgccggtcaggtcatatccgtccgtcagatatacagcaggggcatactggttagccgtatctttaaccggtgtaccgctcagggtgattttgctgttcttaccggcctgaatatgcccgtcgctgaaaagaccgttcagtgctgtaagatgaccgccatcatgcactgtcagtgaactgccggcaaaagcacccggggctgttaacaggacgtccggagaggtgatactgacggcactgtcataagcttcaatccctccggtgaaccggctgccgatatccagggttgagttatggtccagcgtaatattcccttcatactggctcctgtcattcacggtgtccgggacagaggtaccttcctccagaatgacataatttcctgttccgtcatttttatccacaaataccctgtcacttcccagtgtgatatggctgttatccgacttaatgtcactgttcagcgaggcgttacgtgaaagatggaagtcagcatctttcagcgacagtgttttcattatgaactggcggttttcccagtctttctggttcaggctgaccggcgcactgccactgacggaggcgtggataaccggatgcccctggaatatcagggtgccactgtcctcactcagggtaccttccggcaggttcacgctaccatcaaggatgacctttcttccccccggcagctgtggaatggtgacatccatattcccggtcagctgaccatgaaagataacgggttgttttgcccgcccggccaggatccggtcttttactgtctgaactgctttgtttttgtccgtgccaacaaattcccactgagccgggtcattcaggctgttcccccacagggtgttaccatagctggcagatttcagaatatagaagcgggtctggccgttgagtatcatgctgtataggtttcccggtgtgccggtaccgccaaagggggatatactgccaatcggaacactgacatttgtatcctgagccttaagatccagtaaaagccgggatttttgctgtgcattatttgtaatcaccgccccgtaatcggcagcctgcagtcgggtgaaggtaacggcattaccattaaggtcaagcttacctccccggtatccccatgaaatgttatccggattgacctgacgggcatctccgagcaccacggtcggtcgtccgctggcgaggttcacggaactgaaggcctgaacattacctgcagtgtctgcctgctggttaagtacaacggtaccgtctcccgttttcagtcctcccgggtttacacctgttccgtttatggtcagggttccttcccccaatttatgcaggttgtcaccggcaaccccgttgaccttccaggtcacattcgtccccttgtcagtaataatgccggcacccgtccaggtttttccggattcagcagatacggtgtaactgtctttaaattcgagataaccggccccctgagtcacactgtctttcaggacaattgcaccgttctgcccgctgaataccagatttttaccggcattgagatcattgtctttctgcccgtgcatggtccagtttttactgccctggctcagggtgcctgtgcctgatgttttgtcgtatgtccagttcagggggggcagtccggaaacaaagtccacgggggcatcgaaatcgtcctgcataacctggttcagataatctgttggtatgacattccaccagttcgtagcaccattaatacctgcatatgctcttaatacagcaacaataacccattttttttgttgttcatcataagcaaacaaaggagaaccactgtccccaggggcaccatagtcaggtaaaggtccgtttacaggattataggtttgcccgggattagagactattgttgcatcagatatcagaggaactcctgtggttcctcctgttttaaaagcatatccgccggcaaccttaactaaatttccgtccttgtccttagtgtactgcgtaccactacccacccgataaaaagcggtgtaacgttcagtgtctttataagcattggctttggttccttctgatgttatcgctgagggaataacttctgtaaccagtttattcagacgtggagcatggaagtcaacagaagagtggttattacggtcaacaagggaatatgtatttttcccattaccaaagctcacactctgatatcctccgttatgctttacgctgacgatatattgaggtgatacaagcgtagcaacgccatttgagctcacactgctgaaatcggccattggggctttatccagtctccccacaagttttccgtccttatcatataccggaatatctgtggcaccaggtacaaaaagccctttgttttcagcgaaatcacgataaatctgataggcaatatcggaacggacaatgcccgcctgggatatctgagggtaatacagatagactgctggaatgccagccagaagaatatgcgttaatcttcggcatgtcttttttattaccctgctggcaagttcagagacaacaataagtcccccggtgacagggcaatatttaagagaataaactttattcactgcggactctccatgatgtttaagtactaatgataaccagacgttatcacccgggcggaaaatatagtgactgcattaatgtatttttgtgatgtctgttacatagtgaaatacttttcgtttgcttacaaaattaccgctcctgcaatttttttcacatatgcggtattgtttttatatgtttttattactgccaccattaattatactcgtgatttttacttataaaaaataaacataacccatctaattttataacattgttaccctgggtatttacttaagagtattaccagagggtgattttatccggatatgacaagtataggttgcctcattcagtattcataaattatgtttaccacggagtacccgacttcctcatcgattgtcctcggatgactatttttattgtaaatgtaattgagatactacagcattttgtttaaatgccattctgttcataatcacttgtgcgatgtgcataacaccttaagtttttaacgactttctcgctgaaatactattttaaaacttcattttatgtctatatcttttaatggggtaatgttaaataaaaatttatttttttattggtgataaagaatgaaaatgcatgcaacaaccggcttttattgtcattgtcatttgtaagattcaaaaaaatcggacatttcttataatttcccagtgataataataagaaataataaatattttattattgttaccttcttttgttgtgatgagcatcacaatttattcctgaatcaattcattatgtatttgaattagttaaaacgtgcgcttaacgcgcaagctttccgtttccaagactgcctgggtatggtgaatcaggtctaacggcgcttgcaaggccaacaatcaacgaattaagcgccagacgtatggtcaaaagtagtggagtagaaaagggggaattatttgttggagtgcaaattcgccagctggtactccctttccctctggaagctcccttgtgcgtacctctccgcctttctcccttcgggaagcgtagcgctttctcattgaaccgccccgggtttcctggagagtgttttatctgtgaactcaggctgccagatcatcgtttccgatggaagcataataagctttttctgcttctgccggaggagtatggccctgcctttccagcaatcgtcgattgttataccagtccacccacgtgagtgtggttctcatagctcacgctgttggtatctcattttggtacaggtcgttcgctgcaagctgggctgtgtgctttctcatagctcacgctgttggtatctcattttggtacaggtcgttcgctgcaagctgggctgtgtgcacgctccgttcgcaagcttgcctgctggttatacctgatgatgaaattattctgactcagaatgtgttatctttgttacagaaatattgctctcattaataagcagcggtgtccagctaatcactagaactttgcggtattactctgtttcctgcgtggtcctagatttgttccggataaaaacaattctcctctctgtggagttgtatccaggatgagatatacgtctccgtcctgaaaaagcaagtaattaatcaaaaatgtattttggttccatacatatagtatgtaatatcattcagacgcttacttaacttatttttagcatgcggtatactctaccgcgataatgcaaccgtacaatattgtgattgtgcgcttcccaaacgctgctctgtgactatctcatcattatttgtcaacgacggatgaaaagtagctcttccgcaacctgggtggaagaaaatggatgaaactttctggtgaacaaggatctaagctgttttcagttatgggcaacgcaatgcactctcttaagacacttctacagttaccttgcggatggtaatgcagtcgacaaattattagatctgacggtataaccctccatctccgcggaaaacgcaaaacagcgcaatgtcctgaatgctttaagcgtagcgattctgttcatagttgtccccggcgccggatacagcatctaccctgcacaggccagacgctatggcttgtattttccgtccgccactggtactgccgtaacccggcttgttcacgtaaaatttttgccgggtcgcttgctcccttagccagttcacaccagcagtcttcacagtcgttacaaaatttacagcgtcagatgggattaatagccggaggtgaggctggaaaacgggcagcaacgacagtgggtctccgttgcagtgcagatactcttcttcgcaggcttataataccctggagacgaaactgtcaggctcgccccatgtcggtattgatgagtggcgtggcatcggggccactgctgcggtatgttaatagtcaatcttgatactcaccgtcccctcgtcctgttgcacggtcgcgatcagcatacgctggcgacctggttcagaaaatatccggaaatacaggttgtctcgcgtgatcgctgcggaatcaatgcgacagcagcacgtgaaggtgcacctcaggccagacaggtagctgaacgatggcttctgctaaacaatattggcgatgcgcctgaacgaatgatgtacagacatatgactctgatacgtcttgttaccagttagttgtcaccaaaggaataacccggggcaaaaccatctgtgcctgcagtatcgctccgtcgtccggaacgccttaaacagcaaacccgcaaaaaacggcatcagctttggacagaggttatggccctgcataacaagggatgtagtttcagggaaatatcccgtattacaggcctgtcgcgtgtgacagtcagtcgcagggggcgttcaggaacattccctgaaatgtcaacccggcctccaaagcgagggcttctggacccatggagggagtggttaaaagagcaacgagaaagtggtaattataacgccagcaggatatggcgggaaatggtggccaggggggtacaggcagtgaaaccatcgtcagggatgctgttgccaaatcgcgtaaaggctggatcccaccggttactactgccgtcagacttccttcagacttccttcagtgtcccgggtaagccactggttaataatcaggggtgaagaaaattatgcttcccgatttattagtctgatgtgtgaaaaagaaccggagctgaaaatagcgcagcaactggtactcgagttctaccgtattctgaaaacccaaaataaatcacagctaagcagcttgttcactcgagtccacgaaagcggctcagcagaacttcggtgcgtggctgcggggatggaagctgatgctgcggctatatgtgaggcaatcagcagtcgctggagtaatggtgttgtcgaaggtcatgtaaatcgcctgaagatgttgaaacgccagatgtatggtcgagccggatttgaactactcaaacagagggtaatgagtccactggcatgagaatctccacccaggttgcagaagagccacttttccagttctgcatcagtaagtggaggtgttttttgagattttgtcatgtctttgctccggcctggttttatgttcagaagaccttcttcacccagtgccggataacggattcatttgagatattaaaccgtgcagcggcctcgcgcgtggtaagttcttcactcagagacttcaggacaaccgtcagtcgaaactcaggagtgtggaggtcatttttccatgtgatacgatcaatatcgtggagttaccagtctcttaccttacccagcagatgttttttcaacaccaaaacgtttagcgatacgacgtgcgccatcgtgtctggaaagataatgattaactacaaccaatctggtttcgagagaatattttggctttgccataaaaattgcacattaatcagttgggtctccaagttttggggtgcagtccacgtacaataaatttttatatccaccccccctttaatcactaccgccttggtcgctacatgatggataacaataatatctataatatagatattatctgcatataaaaattgatttttaccaaaaaaatgcccatttgttttattttataaataattttttgttttgagatttcactttttttagataaaaaccctacagagaagtaattttttagatgtaatctctagtattattggttttattggttttaaatttcatttaatggttttttgattgagggcaaaaaaaatttgatgcaaacaaatatgtatttataatgtgaatcaataataaattaaacattgaataatgtgtaatggtatggcagatcatatacagcggaatacgctaactcattatcgatttaatgtaaaaccagctataaataacatttcaaatgaacacttctggttactaatagaattatctggaattcgaagtgataagatcattatgtcattaagagagcacttagtagatggttttacaaaacgagaagtatgtgaaagaaacgatgtttcactgagttatttttctattagcttaaagaaaatatctcatatacataatgtctgcgcattgctaagtgaatattataataatagtttttagtgcaaaagcacggacaatcacgttattaatattttaaataaaaatcataaaaatgaagcgtaaacatttgttattattattgttgttttcattttccactaacagtgcgcctctttactccttaattagggaggcagttatgcacgatcccatagtaatggaagcccgggcggagttaacttcggcacaatcccgcatagagcaggcaagctctgcacattggccagttgtcacagctacaggaagtaaactcctttcacaaagtcaccgttattcctacgattatgacactgaagatattttacccggtattcgtggtgaagtgaatatatttgcttcaggggctattgaggcggatgtgcgtcggagtgagtcagaagccgaatattatcattataaaatggaagaaacaaaagaggaaacaattcactcttttgtttcattatatcttgatgcactcagggaaaaacaatccattgcggtacttgaacagagcctttcccggcataacgcaattcttaatgacctgaataccatcagtattcatgataccgggcgggagtctgagcttgttcaggccgaagccagaaggttgatggttcggcagcagataaattctaggagcagagtacttaaaaccacgctgggaaaactgtccacttggacaaaaaatccggtaaccgaagctgatcttgaaaatcctttttctaggatgacagaggccaaattattaactgattttacacaggctccacagaaaggtaacccgtcgtggcttgccagccaagctgatgttgagagtaaaaaagcggcactgaaagcacaggagcttgcccggtaccctcgggtggatttaacggggtctgtaacccgggatgaccagcagataggggtcaatctgtcttgggacctctttaaccgtaatgccagttatggtgttacagaaaaagctgcgcaaatagtggcagctaccggacgactggactctgtcgcccgaatgattgatgaaaccgggcgattatctctgataacagtcagacaaagtcgaggggaaatggaaacgctcagacgtcaggaacaggcttcagccagagttgtggacttttatcgtcttcagtttcaggtggcaagaaaaacactgattgaattactgaatgctgaaaacgaactgtacagtgtcggactctcccgggttcagacggaggatcagatgctccacggtatgctggattatctgtattcccagggaatgctcctgaaatggagcggagtgaatctttctggtgaagaagaaaaataacggggttgaagggttggtaattaagtgaagagtatttttgaaggattatcacagataacggcgttactgggtacacctgtatctgctgagactctggctgccggtactgtccgtacagatgtatccgggattgattttcgttctgttggcgagtttcttcgtagtgaaggatttgataatcatctttcccggcgatctccggaagatatcccgtcacttgcggttccggcgcttcttttattgaacgctcaggaagctattgtggtagtgcgtattgagggggccggtctggcaagacagtatcatgtgcttcagcctggaggtctccgtaagacactttctcacgatgcattaatggccgtttattctggttattgttggtttgttcagccacaggcaaagcaggatcgtcgctcggagctgccagagtatgacatgagcggggcatggttctggcgggtactgtggcgattcagggcatattacggacaggttattgttgcgagttttatcattaactttcttgctctggtcagttccctgtatgtaatgaacgtctatgaccgggttatacctaatcgttcctgggaaacgttatggatgctgagtatcggggtgattacagcaattctgtttgagtgtgctgcaaagttaatccggagttatctgacggatgttgcgggtaagaaggcagacctgattatcagctctgctctgctacgtcgggtgatggcggtaaaaatgtctgacaggccggcatcctctggttcatacgccagcaatttgcgggaatatgagtctgtcagggagtttatgaccagcgctacgttactggcttttgttgatctgccttttattctgcttttcatcagtgttatcgggctcgtgggaggctggcttgcggttgtacctcttacgctggtcccgctggttattctggcaggaatattactgcagcgaccgctttcccgtcatattaatgcctccatgcgggaatcatcgcagcgtcagggattacttgtggaggctctggacggaatagaaaccctgaagctgaataatgctgttaactgggttcagcgacgctgggatggatatactgcaagtgtcgcccgttcgtccattcgggtaaaaaataccagtaatgtcataatcagcttttccacagcaattcagcaaattaatactgttctgctggtcattctgggaacgtaccttattcacagtgatgacccacataaccgtatcaccatgggggcactgattgcagccgttattctttccggccgcgcgcttgcaccgcttggccagatagcatcactggccacccgtttccagcaggcccgtctggctatgcagggggtgaatgaaatagttcgccgcccggtggaacgggaaagtcagacacattatctgaccgtgaaggatatccagggggaattccatttcagcgcagtcacgtttttctataagcctgaattacctgcagccttgaaaggtatgtctgtctgtatccggcccggagaaaaggtgggcattattggcactatcggatgtggtaaatcgacgctactgaaaatgatggtagggctataccgtcaaaataaaggacaaattacccttgacggggttgctatgcagcaactggatccctgttttgttcgggataaggttttcctgcttgagcagaatccccggctttttctgggaactctgcgtgaaaatctgcagctttcgcgtcttccgggaagcctgtcggatgtggatatgattaatgcagccggacgtttcgggtttgaccgttttattcgtcatcacccatgcgggcttgatatgcagataggggaaggaggtcaggggctgtcaggaggacagcgtcagatggtcgctctgacgagaatggtactgggttctccccgggtagttctgcttgatgaacccacgacgggtcttgatctgcagacagagaacattgttctgaaagggctgaatcactggagccgtggacgcacaatggtggtggtgacgcatcgtctgcaggtgctgaatattgttgaccgtattatcgtgatgaatgaaggccgggtaatgatggatggtccccgcgatgaaatactgaaaaaactgtcagggaaacagcagagtggggagagcagagcgataacttcatgagcgtcaagcggataagaaataaagagcatatatgtttaacagtttgtggaccgcaggggtatgacagaaaaaacggaacggaataaagcgtcgtcagaggtggttaggcagtcagacctggccctgttgacagatgtacaggcagcccttcagcaggaaaagcatcatgcccttttcctgatggtgatttttctgctggtactggtagtgacgtttgttatctgggcatggaacagtcctctggatgaagtgacccgtggtcaggggagtattattcccggcagcagggagcaggttatacagacccttgacccgggtattttgaaaacacttgaggtcagggaaggagatattgttgagaaaggtcaggtactgctgacactggatgatacccgaagctctgccatgctgagggaaagtgaagcccgggtgaataacctggaagcagtcagggcaagactccgtgcagaagcttattccgaatcactgacatttccggatgacgtgcctgcagatttgagggagagggaaagtactgtttatcgactacgaaagactgaactggcacaaagcatcgccggccttaagcagagtaaggctctgctggataaggaaatagcaatgacccggccaattgtgcgtgaaggggcgatgtcggaagtcgaactgttacgtatgcagcgtcagtcagcggagctgcagttacagatggatgagaaacagaataaatacctgacggaagctggagctgaactagtgaagacagaagcagagcttgcacaggcaaaagagaatatggctggcagagccgacccggttgagcgttcacgtatcagggctcccctgagaggcatcgtaaaaaatattcgggtaaatactttgggaggcgtggtttctgcaggacaggacataatggaaattattccgctggaagaccagttgctgattgaggcttatataaatccacgggatgttgcctatgtcagaacagggatgccggcacttgtaaaactgacggcttatgactatgccatttatggtggtcttgacggagtggtgacactggtaagtccggatactttacgtgaccagaaacggccgggagatttaaaactggatccaaatgaagcatattatcgagtactggttactaccagtaataattatctgacagacaggaacggaaaaatattgccagttattcctggcatgatagccagcgtggatataaaaacaggtcagaaaagtgtatttcagtacctgattaaaccaatcaccagaatgaaacaagctcttcaggaacgatgatttattatattattaatatcatggctccgtaatacagacactcaacaggaagtctgtatcgtatcgcaatgaaaaaataattttattaaatttaaggagaataagtcacgtatagaaattattatttttccacctctggaaatgattaatttattttatattgataatcgcaggttttaattagcctaaggattttatatgaaaatgatttttaccggtaaggtcagcggagaaaaaaccgtgctgactgtcggaggtcgtcatacagttaaagcacagcccggggagcagtatggactgatcgatgaggtgaccggcctagtgcctgacggtgttgaggcggatcgctccggtgatgatttaattctgcgtaaaaaggaagaagatactgaggtccggatagagggattctgggaagaatgccagcccggggaaacacagtgtacggcggtatttaatattgttggggaagatggacaggtcaccgaagccgtactgactcaggatggcccggtgctggatgatattactgccggacaatcgggaaccttgtcagatgatgatcgtggcggttttatatggttgggcggtctggcatttggtgggggactggctgctatggctttagctgcaggtggcggtggaagcaaacatagacatgaaaatgatgactctgatactacagccccatcgtcaccagcactgaaggcagaggatgacggttctgtttctgttgagctgccgggtgatgccaataaaggcgataccgtggatgtcacctttgaagatgaaaaaggtggtaagcacaccgtgacgctggagaaaggggataacggctggacatccagtgatccgacgctgatcccggacagcactggcgataaagcgaccattccggcagataacgtgaaggataacagtgaagttaccggggttgccaaagatccgagcggtaatgaaagtgacccgtcaaccgtaacctcaaaaactgatgaaagcagaggatgacggttctgtttctgttgagctgccgggtgatgccaataaaggcgataccgtggatgtcacctttgaagatgaaaaaggtggtaagcacaccgtgacgctggagaaaggggataacggctggacatccagtgatccgacgctgatcccggacagcactggcgataaagcgaccattccggcagataacgtgaaggataacagtgaagttaccggggttgccaaagatccgagcggtaatgaaagtgacccgtcaaccgtaacctcaaaaactgatgtgttaccaacagtgagtattagcgttgagacaacatcaacagatgtcaatggtgatggttttactggtatagctagtgtcaatgggaccgtaatggatgttcccgcaactattgaagataaggatgattccactggactggtttatacggtttctctgaatcatgtcactacaacagatgtaacagttacagttacattgggtagcggagctgggcattctgatgctgctgactattctgatattggtggagcacagcataacgggaaaattggccttcatggtgatactggaaaagtaacctatgatggtgcaacaaccgtaacaattgttattcctgccggttcaaaaagtgtttcatttatagttgatccaacgcttgaggctaaccaagatgcctttaatgccgagggtatggaaaaagttgttgcgaccattacgggaacatctgataacgttacggcagctactgacatcgttgataatgcgggagcatccgcaacaggtgttatttatgatggtaatgccatttcattacgtaatctggacggtgattttacactgaaatattcactatcatcttctatcgccgaaaaaggggactttgggtataccattggcgcgaatagtggtgaaaatgatccaatggtaacaacagattacaatgatacggtttatgttggttattaccagagtggtaaagaaacaacatcgtatagtaatgttgctaactcacaggataatgggccagacggaacaaaaaccgatggcaatcaaagcattacgactgttgatttaggtgctggtgatgatctaatggtcattcgtggtaacatgctggctaatacaagagtatatactggtgagggtaacgatacttttactatggatggtatgaatactgcattacgtgttatgtatgcgggtagttatatctttactgagtctggcgatgatattgttacgatcaaacgtactggtgtaacaaatgccggacagatttatcttggttcaggtagtgatacatttatccagggggatgctactgacaataacgatacaacattatctggtttattggatcttggtagtggtacaaaagatatatctaatatgcctaaggaatatctttctgtttatcaggatggcagtaatttaagcttgggtaacgacaacaatattgacactgccacagatgttaataccgtcactatttatggctctgtgtctggtgaaattttaggcggatacggcagtgataatattacggtaactaaaaatctgaccggtaatatttctgtcggtgacaatgcggataccttaacggccggatggatttatggtggcagtactgtctctatgggggacggcaatgatactgttaccatcacagatggtgcatataacacgactatttcactgggggcgggagatgatgtatttgatgcaacttctggtgtaatgggggattctgcttatgccactgtcgttaatggtgaagacggcaatgatacctttaaattaggcacaattgccaaaaacctgaccattgatgccggtgccggtgatgatattgttgttctgacaaaagactatgactccacctcctccggtaatcagggctatattaacggcggggaaggcagtgataccctggttctgacaggtaccatttctgtcaatctagcggccggtaaaaatgaaggtattgccggcttcgagaaagtggatatgactgttggtagcgatctgaaagctgacaatgcagctcagttagtcaagttaacggcatcggatgtattgggtataaatgacaattcaacgatttatatttccggtgatgccaatgacaaagttgatttgggggctgacggagcgggaagtctgggtacatttacggcaacggcaacaactgttaaagcaactgcgttagatggtattgagcatacttatacgttatacagcagtgtaagtggcgcaaatgtgtatattgataacaatattattgatgcgaatggtgtaatttaatagttgtcttattcatgtgggagggaaacttcccacatttttgagtgttatagaaacaacttaataatttgcaaatgagtcaatatgacatttatatacttcttgtagaaggcataatgtatgaatataatgattgttacgcacaataaatatcttgagttaggtttgaaaaaattattgagcaggcattctattactattggtgctgatttttttataccagataatcgtgagcatataataaacaataatatttttgtcattctctgtgataaaaaaaacagtatgttaatgaattatatttttaacggttatagattttacttattaccagtagaatcaataagtagcctgtcatcgatttatgaatgtatgtttagtggcaggttgttgtttgggaactctccacataaattaaccatgaatgagatgattatactattctattatgttttccatgggtggaatgtagcaagtattgcttatcagtttggtatgagttcaaagactgtgtatactcatatatataaagcaaagaaaaaaaatggaatatcaggaaaaaatctcaaatataaatgtgcttatgaaaggcttgtctgttaattgaagtgttggtcgctttatatgaaagttatatgtgataatcgttatttccttattgggatcaacaaaacaattgaagatgtcatccagaaaaataaaattaatggcgtaaaaaatattattataatatcatcccctaaaacgtcagatgttttttgttttttacagttcaataacattgattttaggtgttcggataccattttttatgctccccctgaaacctttgattttctcagggatattatccacgcccctatttgcaatataaaggatttaactaaaaacaatccacttaataacacacattatatttatagagtaaagaactctcattataagctttctttatctggaaggcagaaggaggtcctgctgatgtttttatatggtttaagtggaaaagatattgctaataacctcggcgtttcaataaaaactgtttcgagttataaaaagtctttaatgaatagactgtatgtcagtaatgatatacagttattttacaaaggtctattattatgtagataagtgctaattgaacgcgtttgatattaacgacttcagcccagtctgttaccagttgagcatggtgataacgtgcaccatccagaatgatgttgactgtttgattataatcaggataaacctttcttatctcattgaaaaaccgggatatgcttaacgcattaatggttgggtactcactgatgagtgggcgttccggagacttcagatttagcgcacccatgatattcagccgtgtacggctacctgttgtttctattgctttccggtgcccttttcgtatccagccataactgattttggtggcctgagtggggtggacagcatctataaaaagaacaggttcatcgcctgctttttctttcaggtcttcataaattcaatgaattgcgcctgcctctcttcgctgaatttatgaggcgttccagccggttttttgtaagagaagccgttacgatgcaaccatttgttcataccggcaacgctgaacaaaattccccatgtgtggagaacaaaggcgataatttcatgagtatggtgaaacaaattatcagataaatgtttgattaagagtgatgtttgttcagcactgagtttactgtctgaaccaccgttttcgggctttaacttccctttattcataaactcatggatatgatgatcaacggtggtctgatgcaggcgcagagcctgagcaatcatgactgaactccagccttcagaagccagaagaatggctttaatacgatcgcagacccgcttgttacgactggtatcgtgaaggcgttccagctctgctttttgtagatcggagatgaagattttcatgttgcgtagcatgatcctctgtcatgacaaaatcaagcatcttcaatgatcacgggtatagcatcattattctataacatgaataaacggattgaatgtattatgttaaaaatgagtttatacgtaataatattgttattttcctttcagattagtgcagccattactagcaaggaaagtgaggctgtttcaccattattaatggatgttaattcttcactaacaatggaaatatttctgaatattccacatcatcggaaccatcgcaacagggcgtatttcctgtaatatgtactcgacttcatcctagatccgtaatgaaacgccagttattaacctgctaggggcctgtttttataattggtgatgatcctttttctctgcgctggatgagtgaacatctggagatccttaaatcgctaaatacccttggtttggttgttaatgttgaatcagtagaacgaatggaggtattacagaagcgggctgatgggttattgttattgccagttatctgcgataatttcgtgcaaatgctgcaattaaatgcttatccggtattgatcacagagatggaaatatcacaatgattaataacataattactgctaataatatcgtaattttgaaagtggtaatcctgttcacggcactataattagagttatgtcttgtatccgttcagtataatttcacgaatgctttattaaccggatgcgtgaatgtcattcttcagatgacaaagacgtcatcgcgattgatggaaaagcacttccacactcctatgataaaagccgtcgcaggagagcgggctttcgtagtcttaccccgactctccccggccctaaacgcaacacccactcacagcaacctaaactcatccgcatcccgccatgccggaaacttttctctatattcccttaatacagccatcgacaactccgcatcaatgcgcgttgcctgatgcgcgtcggcagtagcgataatctcgccctgtggattaatcacccggctgtcaccgcgataatggcagccgttgccatcgctgccgacgcgattgcatcccgctacatacgtctgattctcaatcgcgcgggccgtcagcaatgcctgccagtgcagagagcgcggagcaggccagttggcgacgtacagggcgaggtcataatcgttgagattgcgcgaccacactggaaaacgtaagtcgtagcacaccagcggcaaaatacgccagccgcgccattccacaatcactcgcgcattgcccgctttataatgtagatgctcatctgccatgcggaacagatgacgcttatcataaaaatgtaccgtgccgcccggctcaaccagcaaaaagcggttaaccgaaccagactccgtttgtaatgcaacactgcctgcaatcagcgcattgtactgctgcgctttggctgtcatccagttcactacgtcatcttgtgctagcgacgaagctgccgcttccatggcaaagccgctggtaaacatttccggtagaacgatcacatcgcgcccggtaataccttccagttgacgatcaaaatggcgcagattggcagggccatccatccacaccagtggttgctgcaaaagcgtaatcttcaaaccaggcacggtgtacaactcctttatgcgaagggttttataactttaacaccttatcaggcagttgccttagcgcagaataaattgataacaaattctgatattggaaatatctgatttgcaaattatcgtgttatcgccaagctttaggaggttaataacatgggcaggataagcccgggaggaatgatgtttaaggcaataacgacagtcgccgctctggtcatcgccaccagtgcaatggcgcaggatgatttaaccattagcagccttgcaaagggcgaaaccaccaaagctgcttttaatcagatggtgcaagggcataagctgcctgcctgggtgatgaaaggcggtacgtatactcccgcacaaaccgtaacgttgggagatgagacgtatcaggtgatgagcgcgtgcaaaccgcatgactgtggctcgcaacgtatcgctgtgatgtggtccgagaaatctaatcagatgacggggctgttctcgaccattgatgagaaaacgtcgcaagagaaactcacctggttgaatgtgaacgatgcgctttctattgatggtaaaacggtgctgttcgcggcgttgaccggcagcctggaaaaccatccggatggctttaattttaaataattagcggataaagaaacggagcctttcggctccgttattcaattacgcggcttcaactttccgcactttctccggcagctttaccggcttcgtcgccagctcttctggatcaaagtcatcaacgttaatactacgcagacggctttcttcagctttcaccagaatagcggcttcatctttatcaatcagccccttcgccagtgcgttgtgcgccagttcatccagacgggtaaacggcaggtttttacccaactctttacagatccgctgatgaatcgggtcggcggcaatcacatccaccagcgcctcttccagtaaaccaaccgggttatgcttgctcagtgtcaggtactgaccgcgaccaatacgtgaacgggtggcattcggcacttgtaaaatcttcgccactttatgatccagcttgtcagacggtgccaggtaatgacgtccggtcgggaagatcaccacattcagcagcccggcaaccacgcggttcgggaagttttgcagtaaatcgtccatcgcctgttctgcctgatacagcgcatcctgtacaccccagtgcaccagcggcaggtcggcttcattacggccttcgtcgtcataacgcttcagaacggcagaggcgaggtaaagctgacttaaaatatcccccagacgtgccgagatacgctcacgacgtttcaggctgccgcccagcaccaccatcgagacatcagaaagcagggcgaggttggcgctcaggcggttcaggtgctgatagtagcgtttagtggcatcgccggttggtgtgctgctggttaaaccgcgcgtcaggcccagccagaagctgcgaactttgttgctaccgacgtgaccgatatgtttaaacaggagttgatcgaacgcgttaacgtcattgttcttcgccgcttccatctcttccagcacgtacggatggcaacgaatcgctccttgtccgaagatcatcatgctgcgggtcagaatgttggccccttcaacggtgatggcaatcggtgcgccctggtaagcacgggccaggaagttgctttgcccgagcataatgcctttaccaccagtgatatccatcgcatcaataatcgactgctgcccgcggtgggtacagtgatacttaacgatagccgacagcacggcaggtttttcaccgagcataatgccgtaggtaatcagcgatgccgcagcatccattacataagcgtttccggcaatacgcgccagcggctcttcaatcccttccatcttaccgatagagattttgaactgccgacgaatgtgcgcatacgcgcccgttgccagcgctaccgatttcacgccgccggttgagttggaaggcagggtgatgccgcggcctaccgagaggcactccaccagcatccgccagccttgcccggccattttcggcccgccgatgatgtaatcgatcggcacgaacacatctttaccgcgcgtcggtccgttctggaacggtacgttcagcgggaagtggcgacgaccaatttccacacccggcgtggtggtcgggatcagcgcacaggtaatacctaaatcttctgcaccaccgagtaatttctccgggtcggagagtttaaacgccagaccaagcacggtcgcaatcggtgccagcgtaatgtagcgtttgttccaggtcagacgcatccccagcacctgctggccctgccattcgcccatgcagacaatcccggtatccggaatcgcgcccgcatcggaacccgcttcggggctggtcagtgcaaagcaagggatctcctgaccacgcgccagacgcggcagatagtgatttttctgctcgtcagtgccgtaatgttgcagcagctcgcccgggcctaatgagttcggcacgccgacggtaatcgccaggatcccgctcacgccggagagtttttgcagcacgcgagactgggcataagccgagaactccagcccgccgtactcttttttgatgatcatcgcgaagaaacgatgctctttaaggtacgcccacaactccggcggcaggtccgccagctcatgagtaatctggaaatcattcgccatccggcaggcttcttctaccggaccgtcgagaaacgcttgctcttcagtggtcaggcgcggctgcggatagttatgcagctttttccagtccggcttgccctggaacaagtcgccctcccaccaggtggtgcccgcgtcgatcgcttctttctcggtgcgcgacatcggcggcatcactttgcggaatccacgaaacactggcgcagaaatcatcgatttacgcataggggcaaagttaaacggtatgaggataatggccagaggcactagtacccacgccgaccacagaccagcaacgccgaggacggctgtccaggcgagcaaaatcagactgctgataaataagctcacgcggtgatagaacaatgcgccgagcaggacaaccgtagcgagaatactcaaaatcatcataacgaaaagccccttacttgtaggaggtctgaccacttgtgatgatatggttgtagtggatgtaaaaacatttagcaatgtgtttacaatataattacaacaaagctcacattgttgctgtttttatccgcacttcaggtcaaaaagtcctggtcatagcacctgcccgtacttctcgcttttggcggtatccggtacactgcattttgtctattacatttatgctgaaggatatcctcatgtaccaggatcttattcgtaatgaactgaacgaagcggcggaaacgctggctaactttttaaaagatgacgccaatattcacgccattcagcgcgcggcggtcctgttagcagacagctttaaagccggtggtaaagtgctttcctgtggcaacggcggctcccattgcgacgccatgcactttgccgaagagttgaccggtcgctaccgtgaaaaccgtccgggctacccggcgattgccatttctgacgttagtcatatttcctgcgtcggtaacgattttggtttcaatgatattttctcgcgttacgttgaagcggtaggtcgcgaaggcgatgtactgctggggatctccacctccggtaactctgcaaacgtgatcaaagcgatcgcagcggcgcgtgagaaggggatgaaagtgatcaccctgacgggtaaagacggcggcaaaatggctggcacggcggatattgaaattcgcgttccgcactttggttatgccgaccgcattcaggagatccacattaaagtgatccatatcctgatccagttaattgaaaaagagatggttaagtaagtctggcgtaggccagataaggcgtttacgccgcatccggcatttgtgctctgatgcctgatgcgacgctgacgcgtcttatcatgcctacaatctgcacccgaaccgtaggccgaataatgcgttcacgccacatccgacctgaaaattcttaaatcaatcttcgccgggggccatgcgctcccgctgttgtggaggttacccatgtgcgaattgctcgggatgagcgccaacgtccctaccgatatctgctttagtttcaccggacttgtacagcgtggtggtggaaccgggccacataaagatggctggggcattaccttttacgaaggtaaaggctgtcgcacatttaaagatccgcaacccagctttaattcccccatcgccaaacttgtccaggactacccgataaaatcctgttcggtggtggctcatattcgccaggctaatcggggcgaggtggcgctggaaaatactcacccgtttacccgcgagttatgggggcgtaactggacttatgcccataatggacaactgacgggctacaaatcactggaaaccggcaacttccgcccggtcggtgaaaccgatagcgaaaaagccttttgctggctcctgcataaattaacgcagcgttacccgcgcacaccgggcaacatggcggcagtgtttaaatatatcgcctcactggcggatgaactgcggcagaagggcgttttcaacatgctgctttctgacgggcgctatgtaatggcgtattgctcgactaatttacactggatcacccgccgcgcgccgtttggcgtggcaacgttgctggatcaggatgtggaaatcgacttcagctcgcagaccacaccgaatgatgtggtcacggtgattgcgacacagccgctgacgggcaatgaaacctggcaaaagattatgccaggtgaatggcgcttatttttcctcggggagcgtgtagtttgatgccagttgtggctgcacaacttcgtggcttaacggcttgctgaccacgtaacggccattgaccacagaaacggtcggtggcttacgggtttgctcaaagtagtcgtagcccggcttcagttgctcccagaagtccttaaagttggaatatttatggcgcttcatattggcgtcggtcatacggaacgggtaaatactcacttgcacgctcggctgaccaaacaccagcgcaccagtaacgaactggaagatctcatcaataccctgattggtcatcgcgtagcagccgatggaaacacaatcgccgtgaatcatcaggtatttcccttcataaccatgcgcacggtcataggcgtttgggaatccaatattaatcgctttgtagtaacggctgtctggttttaactgattacgctggacgctataaaacccttccgggcttttgaaatcgccctgacgctgttttggccctaatccgccggaatatttacagattttatagctgtcgagcagttgatattgctcgcccattttgacgtagagatcgagcgtacgttcttccttgaagatctggatgtagacaggggatcccatcaactgctgcttatactctttgctcactggcgtggtcgagctactgctgcccagcaaaccggcaaacgaaacgcacgggatcaacaacatcgcaagaattaatgcgattttacgcatactgcttattccttgataaaacggttacacacgccaggacggcaaaatgaatcccaaatcggaatagtctggatttggaaggctcacattatcaccaaaagagttttacgcaagcctgtcggcgcagggtttacaaatttagcacaggggcagttttcaagagtccgaaaagcgcatggattgtagatttatttcttatttcctaagattatgaaaccgcaatagtaatatgcaaataagcaattaataatcccgtttactcctccggtcttttaaaattctcaccttcattcagctggtttatgtccttcatgtcttcgttcttgcacggcagatttctgcatccaggcgtgttttcgttatgcgttttgctccctttactcgccagcgccaccacatcacatatctcttttagctacgccgcccgccagcggatgcaaaaccgtgcgcgtttattaaaacagtaccaaacccatctgaaaaagcaggccagctatattgtggaaggcaatgccaaaagcagaagggcgctgcgccagcataatcgggagcagataaaacagcatccagaatggtttcctgcgccgctcaaggcgagtgacagacgctggcaggcgttggtggagaataatcatttcttaagcagcgaccatctacataacatcaccgaagtggcgattcaccgcctggagcagcagctaggtaagccttatatctgggggggcacgcggcctgataaaggcttcgactgtagcgggttggttttttatgcctacaacaagatccttgaggctaagctcccgcgcacggccaatgagatgtaccactaccgtcgggcaacgattgtggcgaataacgacctgcgccggggagatttgctgtttttccatatccacagtcgtgagatagccgaccatatgggcgtatatcttggagacggtcagtttatcgagtcaccgcgcaccggggaaaccattcgggtaagtcggttagccgaacctttctggcaggaccattttttaggcgcgcgacggattttgacggaagagacgattttgtaggccggataaggcgttcacgccgcatctggcggttgtgcgccggtgtctgatgcgacactacgcgtcttatcatgccgacaaaaccgcactcaccagtaggccggataaggcgttcacgccgcatccggcggttgtgcgccgatgccagatgcgacgccacgcgtcttatcatgccgacaaaaccgtgctcacccgtaggccggataaggcgttcacgccgcatccggcggttgtgtaccggtgccagatgcgacgcagacgcgtcttatcatgcctatatcagcgcccccattatcttcaactccagctcatccggcacttcgttatacgacagcacatgcagccccggcgcaaacaaccttgcgtagcgcgccagcaaggggcgcagctgcggcggcaccagcagcaccggatctttccccgccgctttcatctgctccttcacctgaggcatcgtgctctggaactggttgagcatattcggatccactggcacgctatcaagcatcactttgccggcctgttgcgcctgattcaccacgttggtcagcagattttccagctcattattcagcgtatacaccgtcagctcctgcttgcgaacgaacggatgggtaatgctgcgccgcagcgccaggcgcacatcggccgccagcagaatatgatctttagtcaccgcactactggcgaccaacacggtggcgatggtgacgatatcgcgcagggaaacgccttcagtcagtagcgcccggtacactttcagcaactggctgtaattgagcgccgcgctcaaatcttccgccagtcgcggtgccatcgacgacaaacggttatgcagctgagtaatatcgtcatagttaaacaaatcaggaatatagctgcgcacaatcttattcacatgggtggcaattacgctggcgctgtcgatcacctgataccccatattcagcgccttcgctttctgcgcgggctgaatccaggtgaccggcatcccgtacgccgggtcgttccccagcacgccgtctatctcgccgtaggtttcgctggagggcagggccatcagtttatctgccggaatatccgcttcatcagccttaatgccgttgatgaaaatggcgtactggctgggcttgaggcggaagttttcccgaatacggatctccggcagcagcacgccgttgccgtcggaaatcacctgacgtacgccgcgaatacgctgggtgagcgggttgccctgcgctttatccaccagcgccaccagtttgtagccgaggcttaaactgataggttcgatcagcggaatagtttcccaactgacctgttgctcgctggtttctgtcatcgtacgggttagcgtttcgaggcttttctcttccgcctccgccgcttgcgggcgcttgctcatccgccagccggtaaaaccaagcagggcgctgaacatcaggaacgggaaatgcggcattcccggcaccaccgccagcacgaacataattccagtggcggtgtagagaaccgacgggcttgccagcaactgattacgcacgtcatgggcgatatcaccgttatcgctgacgcgggtgacgataatcgccgccgcggtggagagcagcagggaagggatttgcgccaccagcccatcgccgatagtcatcagcacatattgctggaaggcggcgtcggcgctcaggttgtatttgaagatgccgatacagacgccgccgatcaggttgattgccagaatcatcatcccggcgatggcgtccccgcgcacaaattttgatgccccgtccattgcgccgtagaaatcggcctcgctggcgacatctttacgccgggtttgcgcctgcgtctggttgatcaacccggcgttaagatcggcgtcaatcgccatctgtttgccgggcatcgcgtccagggtaaagcgggcagaaacctcggaaatacgctcggcccccttggtgacgacgataaagttgattgtcaacagcgtcagtaaatccgagcgtgaaagcattatcgccgcgctgcacgggcagtcgattttcaatggtggcgggctgtcgccgttaaataaaatcagcccgtctcatccgccaaaacctgccaccgtggcggtgccggaagagacggagaaaaaagcgcgcgacgtcaacgagaaaacggcgctgctgaagaagaaatccgccaccgagcttggcgagctggcaaccagtatcaataccatcgcccgtgatgcgcatatggaagcgaatctggagatggagattgttccccagggattacgcgtgctgattaaagacgaccagaaccgcaatatgtttgaacgcggcagcgcgaagattatgccgttctttaaaacgctgctggtggagcttgcgccggtgttcgactctctcgataacaaaattattattaccgggcataccgatgcgatggcctacaaaaacaatatctacaacaactggaacctttcgggcgatcgcgcgctttcggctcgtcgggtgctggaagaggccggaatgccggaagataaagtgatgcaggtaagcgcaatggcggaccagatgttgctggatgccaaaaatccgcaaagcgcgggcaaccggcgcattgagattatggtgctgaccaaaagtgcgtccgatacgctgtatcaatactttggtcagcatggggataaagtggtgcagccgctggtgcaaaagctggataagcagcaggtgctttcgcagcgagcgcgttaaatgctgaatctttacgcatttctcaacccctgaaattactgtatactttaccagtgttgagaggtgagcaatgcgtaaaatcattcatgtggatatggactgctttttcgcagcggtggagatgcgcgataatcccgccctgcgcgatatccctattgctattggcggcagccgcgaacgacggggggtgatcagcaccgccaattatcccgcgcgtaaatttggcgtacgtagcgctatgccgacagggatggcgctcaaattatgcccgcatctcaccttgcttccagggcgctttgacgcctacaaagaagcctcaaatcatatccgcgaaattttctcgcgctatacctcgcgcattgaaccgttatcactggatgaagcctatctcgatgtcaccgatagcgtccattgccacggttctgcgaccctcatcgcccaggaaatccgccagacgatcttcaacgagctgcaactgacggcgtctgcgggcgttgcgccggtcaagtttctcgccaaaattgcttccgacatgaataaacccaacggtcagtttgtgattacgccggcagaagttccggcatttctgcaaaccttaccgctggcaaaaattcccggcgtcggcaaagtctcggcggcaaaactggaagcgatggggctgcggacctgcggtgatgtgcaaaagtgtgatctggtgattctgcttaaacgctttggcaaatttggccgcattttgtgggagcgtagtcaggggattgacgagcgcgacgttaacagtgaacggttgcgaaaatccgtcggcgtggaacgcacgatggcggaagatattcatcactggtctgaatgtgaagcgattattgagcggctgtatcctgaacttgaacgccgtctggcaaaggtaaaacctgatttactgattgctcgccagggggtgaaattaaagttcgacgattttcagcaaactactcaggagcacgtctggccgcggctgaataaagctgatctaatcgccaccgcgcgtaaaacctgggatgaacgtcgcggcgggcgcggtgtgcgactggtggggctgcatgtgacgttgcttgaccctcaaatggaaagacaactggtgctgggattatgaataacatacaaataagaaactatcagcctggtgattttcagcaactatgcgctattttccttcgagctgttacgatgacggcgagtcagcactattctccacagcaaattgccgcctgggcgcagattgacgaatctcgctggaaggagaaactcgcgaaatcacaagtgcgggttgcagttattaatgcacaaccggttggttttattacccgcattggacattatatcgatatgttatttgttgaaccggaatacacccgacgcggagttgccagcgctttgttaaaaccattgattaagtctgaatccgaacttacggtggacgccagcataaccgcaaaacccttttttgaacgttatggttttcagacagttaagcagcagcgcgttgaatgccggggaacgtggtttactaatttttatatgcgatataaaccgcaacattaaatccagcttgcaatgaaaataacgcccgtctagtatgtgcgcgttttcttattccacaaactgcaaggaggtaaatcatgacaaatcctttatcaatgactctttgcagacctttccaggattaattcttttttcttgccctggattcgtctgccatttcctgatttttattcataaatggaatggtacatgggcaaatatattcgtcccttatccgatgcggtatttaccatcgcatctgatgacctgtggatcgagagtttagcgatccaacaattacacaccacggcaaatttacccaacatgcagcgcgttgtggggatgccagatttacatcccggacgcggctacccgattggcgcagcgttcttctctgttggtcgtttttacccggcactggtcggcaatgatatcggctgcggcatggcgctatggcaaacagatattctcgctcgcaaatacaacgccgataagtttgaaaagcgattatcagatctggatgacgttgctgaagaaagctggctggaggaaaacctgccgtcagcatttgcacagcatccgtggcgcaactcgcttggctccatcggtggcggtaaccacttcgtagaactgcaacagattgatcaaattatcgacgcggaactgtttgcactggctggtctggatgcgcagcatctgcaactgctggttcatagcggctcgaggggattggggcagtctattttacagcggcatattgcctcgttttcgcatcatggtttgcctgaaggcagtgacgacgcgctacggtatattgcggaacatgacgatgcgctggcgtttgcgcgtattaatcgccagctgatcgctttgcgcataatgcaacaagttaaggccaccggaagtccggttctggatgtggcgcataactttgttagcgcgtgccaaatcggcgatcaacagggctggttgcatcgtaaaggcgccacgccggatgacaacggtctggtgattattcccggttcacgcggcgattactcctggctggttaaacctgttgcgaacgaaaaaacgctccactcgctggcgcatggggcggggcgtaaatgggggcgcaccgagtgtaaagggcgtctggcagcgaaatacacggcgacgcaactctcgcggactgaacttggcagtcgggtaatttgtcgcgataaacaactcatctttgaagaagcgccacaagcctataaatcggctgaaagcgtggtgcaatgtctggtgctggctgggttaattattcctgtcgcgcgactgcgcccggtgctgacgctcaaaaacagtggagggaaaaaaggatgatcttgctacaactctcctctgctcaggggccggaagaatgttgtctcgcagtgagaaaagcactggacaggctgattaaagaagctacccgacaggacgtcgcggtaacggtgctggaaacagaaacgggtcgctactctgacacactgcgttcggcgctgatttctctggatggcgataacgcatgggctctaagcgaaagctggtgcggcactattcagtggatttgtccgagtccgtatcggcctcatcatgggcgcaaaaactggtttctgggcattgggcgttttaccgctgatgagcaggaacaatcggatgcaatccgttatgagacgctgcgttcgtcggggccgggcggtcaacatgtcaataaaaccgactcggcggtacgcgccacgcatctggcatccggtattagcgtgaaggttcagtcagagcgcagtcagcatgctaacaaacggctggcgcgattactgattgcctggaagctggaacaacagcaacaggaaaatagcgcggcgctgaaatcgcagcggcgaatgttccatcaccagattgaacgtggcaacccgcgacgaacgtttacagggatggcctttatcgaagggtaatgaaggatgaaactgccggaaggcgattaaacgccatccggcagcaaatcaaataattacttcgccggaatttctttcagcagttcagtcagcagtgtccagtaatggccaacgctttcgatatgaacttgctcatccggagagtgtggaccggtgatggttggcccgatagacaccatgtccatttccggatacggttttttgaacagaccacattccaggcccgcgtggataatctggatgttcggcgtcttgttgaacagacgctgataggtttcacgtaccagatgcattaccggagagttagcgtccggctgccagccaggatatgcgccttttgcttctgttttcgcacctgccagtttacccagtgaatccagcatgctcactacgtagtctttaccgctgtcgatcagagaacggatcaggcagtgaatttctacgttattgtcggtcatggtcaccacaccgacgttcagggaggtttcgaccacaccttttgccacgtcggagttgcggatcacaccgttcggggttgcgttcagcagacgaataaaggtatcgcgagatgtcgccgttaatgcagctttgtcgttcgctacggagtccagcagcaatgccagattcttctctttttctgccagttcgtttttcaggatctcctgataggtatccaccagagatttcagggcgtcgactttatcagctgcgacagcaatggtcgcaaaggcttcacgcgggatggcgttacgcagtgtgccgccgttgaaatcaataaggcgcaggtccagttcttctgcatgacccgccaggaagcgcaccagcagtttgttggcattacccaggccaacgtggatttcaccgccggagtgaccgcctttcagaccttttaaggttaacttgaaggtttcaaaaccagctggaaccgcttcacgatctaaatgcaggttggaggtgaagtcgatacctcccgcacaacccatgtagatttcaccttcttcttcggagtcggtgttaatcagaatatcagcctgcaaccagttgctctgtaagccaaaagcaccgtccataccggcttcttcggtcatggtcagcagcacttccagcgggccgtgaaccacgttttcgtcagccagaaccgccagtgcagaggccataccaatgccgttatccgcacccagcgtggtgccgcgtgctttaacccattcgccatcaatataaggctggataggatctttagtgaagtcatgcacggtgtcgttgtttttttgcggcaccatatcgaggtgggcctgcaagacgaccggtttacgattttccatacctgcggtagcaggtttacgaatcaggatattacctacctgatcgcgttcgacatggaaacctttctcttttgcccaaccaacaatgtattcagcgagttgctcttcatgataggacgggtgaggaatagaacagattttggcaaaaatatcccacagcggctgtggagataattgagacagttcagacacgttaagtctccttgtcgatcacccgcaaaacagtattgcaggtcacagggttagcagaaaatgttgtcaacacaagacaggcttgcgagatatgtttgagaataccactttatcccgcgtcagggagaggcagtgcgtaaaaagacgcggactcatgtgaaatactggtttttagtgcgccagatctctataatctcgcgcaacctattttcccctcgaacactttttaagccgtagataaacaggctgggacacttcacatgagcgaaaaatacatcgtcacctgggacatgttgcagatccatgcacgtaaactcgcaagccgactgatgccttctgaacaatggaaaggcattattgccgtaagccgtggcggtctggtaccgggtgcgttactggcgcgtgaactgggtattcgtcatgtcgataccgtttgtatttccagctacgatcacgacaaccagcgcgagcttaaagtgctgaaacgcgcagaaggcgatggcgaaggcttcatcgttattgatgacctggtagataccggtggtactgcggttgcgattcgtgaaatgtatccaaaagcgcactttgtcaccatcttcgcaaaaccggctggtcgtccgctggttgatgattatgttgttgatatcccgcaaaatacctggatcgaacagccgtgggatatgggcgtcgtattcgtcccgccaatctccggtcgctaatcttttcaacgcctggcactgccgggcgttgttctttttaacttcaggcgggttacaatagtttccagtaagtattctggaggctgcatccatgacacaggcaaacctgagcgaaaccctgttcaaaccccgctttaaacatcctgaaacctcgacgctagtccgccgctttagtcacggcgcacaaccgcctgtgcagtcggcccttgatggtaaaaccatccctcactggtatcgcatgattaaccgtctgatgtggatctggcgcggcattgacccccgtgaaatcctcgacgtccaggcgcgtattgtgatgagcgatgccgaacgtaccgacgatgatttatacgatacggtgattggctaccgcggcggcaactggatttatgagtgggctacccaggcgatggtgtggcaacaaaaagcctgtgcggaagaagatccgcaactcagcggtcgacactggctgcatgcggctacgttgtacaacattgctgcctatcctcatctgaaaggagatgacctggccgagcaagcgcaggctttgtcaaaccgcgcctatgaagaggccgctcagcgtctgccgggcacgatgcggcagatggagtttaccgtacccggcggtgcgcccatcaccggctttttgcatatgccgaaaggcgatggcccgttcccgacagtattaatgtgtggtggtctggatgcgatgcagacggactattacagcctgtatgaacgttattttgcgccgcgcggcattgctatgctgactattgatatgccgtcggtgggcttttcttcaaaatggaagctcacccaggactccagcctgttgcatcagcacgttttaaaggcgctgcctaacgtaccgtgggtggatcacactcgcgtcgcggcctttggtttccgtttcggcgctaacgttgccgtgcgtctggcataccttgaatcgccgcgtctgaaagtggttgcctgtcttggtccggtagttcataccctgttgagtgattttaagtgccagcaacaggtgccggaaatgtatcttgacgttctggccagtcgtttagggatgcatgatgcttccgatgaagcgttgcgagtggagttgaatcgctattcattaaaagtgcaaggattgctgggacgtcgctgcccaacgccaatgttatcaggctactggaagaacgatccgttcagcccggaagaggactcacgcttaatcacgtcgtcatctgctgacggtaaattattagagatcccatttaacccggtgtatcggaattttgacaaaggccttcaggaaatcacagactggatcgaaaaacggttgtgttaaaaatttgctaaattttaccaatttggtaaaacagttgcatcacaacaggagattgcaatgacgttaccgagtggacacccgaagagcagattgatcaaaaaatttaccgcactaggcccgtatattcgtgaaggtaagtgcgaagataatcgattctttttcgattgtctggctgtatgcgtcaacgtgaaaccggcaccggaagtgcgtgagttctggggctggtggatggaactggaagcgcaggaatcccgttttacctacagttaccagtttggtctgttcgataaagcaggcgactggacgagtgttcggataaaagatgccgaagtggttgaacgattggagcacaccctgcgtgaatttcacgagaagctgcgtgagctgctggcgacgctgaatctgaagctggaaccggcagatgattttcgtgatgaaccggtgaagttaacggcgtgaatgaaatgtgccggatgcatcacatccggcaatatccattaaaactgataggtcatgccaaccgcgacaatatcatcattattaatattcaatttgttatcgctatccagttggttgattttataatcaacaaacgctgacatatttttgttgaaataatacgtagcaccaacatcgacataattgaccagatcttcatcaccgatgccctcaatatctttccctttcgataagacataacccagcgatggacgcagaccaaagtcaaactggtattgagcgaccgcttcaaagttctgcgtcttattggcaaagccgccagagattggcgtcattttacgtgtttcagaatagaaagttgccagataaatattattggcatcgtatttcagacctgttgcccatgcttctgcacgcttgcctgtgccacggctttgcaggttctgctcgttggtacgatcagagttggtataggctccactgatggcgaaatcgctgccaccaaagtcatatgtcaatgacgtgccgaagccatcgccgttttgctttttaacgtcgcggttttcgtttttcccttgatattgcagggttaagttcaggccatcgataacgccgaagaagtcggtgttccgatacgtcgccagaccgctggcgcgtttggtcataaagttgtcggtctgcgccgaggagtcgccaccaaattccgggaacatatcggtccaggcttccacgtcatacaacgcgcccaggttacgaccataatcgaaagaacccaaatctttatatttcaacccggcaaaagcgagacgcgttttttgctgtgcagtatcactctccgctttattaccggcaaactcagcttcccaacgaccataaccagtcagttgatcgttaatttgtgtttcgcctttaaaaccaaaacggatataactctggtcgccatctttactgtcattatcactcatataatgcatggctttaactttgccatagacatccagtttattaccgtctttgttatatatttctgcggcctgtacggatacagatgccacaatgcccatcaccactaatgccagagtgctctttttcattttcattcctgattttaattaacgcgcgaatattcagcgggagagtcccgttgaaaacaggaaagtttttaacctgagattgttaaagatatattacagattaataatattcttaaaatgtggtaatttattaaatctgtaataaaagcgtaaacaactgccgctacgcttgctgatcccgcgcaacaaaacgccatgctttgctcgcagatggttggcaaccgacgacagtcctgctaaaacgttcgtttgatatcattttttcctaaaattgaatggcagagaatcatgagtgacagccagacgctggtggtaaaactcggcaccagtgtgctaacaggcggatcgcgccgcctgaaccgtgcccatatcgttgaacttgttcgccagtgcgcgcagttacatgccgccgggcatcggattgttattgtgacgtcgggtgcgattgccgccggacgtgagcacctggggtacccggaattgccagcgactatcgcttcaaaacagctgctggcggcggtagggcagagtcgactgattcaactgtgggaacagctgttttcaatttacggcattcatgtcgggcagatgttgctgacccgtgctgatatggaagatcgtgaacgcttcctgaacgcccgcgataccctgcgtgcgttgctcgataacaatatcgttccggtaattaatgagaacgatgctgtcgctactgcagagattaaggtcggtgataacgataacctttctgcgctggcggcgattctggcgggtgccgataaactgttgctgctgaccgatcaaaaaggtttgtataccgctgacccgcgcagcaatccgcaggcagaactgattaaagatgtgtacggcattgatgacgcactgcgcgcgattgccggtgatagcgtttcaggcctcggaactggcggtatgagcaccaaattgcaggccgctgacgtggcttgccgtgcgggtatcgacaccattattgccgcgggcagcaagccgggcgttattggtgatgtgatggaaggcatttccgtcggtacgctgttccatgcccaggcgactccgcttgaaaaccgtaaacgctggattttcggtgcgccgcctgcgggtgaaatcacggtagatgaaggggcaactgccgccattctggaacgcggcagctccctgttgccgaaaggcattaaaagcgtgactggcaatttctcgcgtggtgaagtcatccgtatttgcaacctcgaaggtcgcgatatcgcccacggcgtcagtcgttacaacagcgatgcattacgccgtattgccggacaccactcgcaagaaattgatgcaatactgggatatgaatacggcccggttgccgttcaccgtgatgacatgattacccgttaaggagctggccgatgctggaacaaatgggcattgccgcgaagcaagcctcgtataaattagcgcaactctccagccgcgaaaaaaatcgtgtgctggaaaaaatcgccgatgaactggaagcacaaagcgaaagtatcctcaacgctaacgcgcaggatgttgcagacgcgcgtgccaatggccttagcgaagcgatgcttgaccgtctggcactgacgcccgcacggctgaaaggcattgccgacgatgtgcgccaggtgtgcaatctcgccgatccggtggggcaggtaatcgatggcggcgtactggacagcggcctgcgtctggagcgccgtcgcgtgccgctgggggtgattggcgtgatttatgaagcgcgcccgaacgtgacggttgatgttgcttccctgtgcctgaaaaccggtaacgcggtgatcctgcgcggcggcaaagaaacctgtcgcactaacgctgcaacggtagcggtgattcaggacgccctgaaatcctgcggcttaccggcgggtgccgtgcaggcaattgataatcctgaccgtgcgctggtcagtgaaatgctgcgtatggataaatacatcgacatgctgatcccgcgcggtggggctggtttgcataaactgtgccgcgagcagtcgacaatcccggtgatcacaggcggtataggcgtatgccatatttacgttgatgaaagcgcagagatcgctgaagtattaaaagtgatcgtcaacgcgaaaactcagcgaccaagcacatgtaatacggtagaaaccttgctggtaaataaaaacatcgccgatagcttcctgcccgcattaagcaagcaaatggcggaaagcggcgtgacgttacacgcagatgctgctgcgctggcgcagttgcagacaggccccgcgaaggtggtggcggttaaagccgaagagtatgacgatgagtttctgtcattagatttgaacgtcaaaatcgttagcgatcttgacgatgccatcgcccatattcgtgaacacggcacgcaacactccgatgcgatcctgacccgcgatatgcgcaacgcccagcgttttgttaacgaagtggattcctccgctgtttacgttaacgcctctacgcgttttaccgacggcggccagtttggactgggggcggaagttgcggtaagcacacaaaaactccacgcgcgcggcccaatggggctggaagcactgaccacttataagtggatcggcattggtgattacaccattcgtgcgtaaataaaaccgggtgatgcaaaagtagccatttgattcacaaggccattgacgcatcgcccggttagttttaaccttgtccaccgtgattcacgttcgtgaacatgtcctttcagggccgatatagctcagttggtagagcagcgcattcgtaatgcgaaggtcgtaggttcgactcctattatcggcaccattctaacgtctccccaagtctactcaagtatttaaaaacctcttataatcagtatattaatgccccttttagtcttttgacgtctatttaagtaccccaaactctacaagcaattgaggggatttgctgttcagtttagtggagatacccccaagtgaaactcaatgcccgtcaaatagacactgccaagccaaaagagaaggcttacaagttggctgatggtggtggtctgtacctcctggtaaaacctggtggaggagaatattggcgtctcaagtatcgtgtagctggtaaagagaagctgttagcactaggtgtgtatcctgaggtcaccttagctgatgctcctgcaaaacttgaagaagctaaaagaggtatctctgggggaatcgatctgatggaagtgaagcgagaggaaaagattgcccgggaaacgcagttaaacaacaccttcaaagatattgcccttgagtggcacagtaacaaattataatcacaataatagtgtatataattatacattgtatgcttggtaatcatataatgataaaagcttccgataatcagtatgagatttgtccttaaactcctggacatgcttttctaaatcttccaatggtatatgtccatttatacaaataaaattctagtgataaataccttcaggtatgattagacaacatctttattcgatgggggttaatctatatttgatatctttcttttaaataacaacgccattaaaaacgctttgtttaatgacgtttttttattgtttcctatataaagcctaaccagcataaacattggtggctcttatgctcattgtaattaaatgagagtgtgattaatgtctttatatattctggtagttattctctccagaagaatacattgtaagaagatgactgttagtatgttttaacatcaattaacattaaggtttgataataattttttgttggcgagttcaaatgttttcatttcatcatctgatagcccgctccagattttctttagcattacattttgagtgtttattagtttttgagcaagtgtaactccgtcaggggttaagcaaatacttttgcttcgacgatcgtttttattattaattcttttggcaatattctttttttctaatttgtctatgatgtgtgtgatgtttgttttggagaattgtaactccttgtaaatatcagaaggggactgacaataatcatcagacatatataatgaaactaacaccataaatgttgaggtgtttattctatactcgctcaattcattttctataatactctggattttgtcatttactctaatatataagtgtattaacagactctcctgagccgggtatgccggatttttgatttttttgtagtttgttatagtttttaataaatctatattattcataattccaccacacggcaaaagaaaactcatgaagattactcaacctgagtgttacatgaagtatcgtgaacgccggaaaatctaagttccagcctgtaccgtaatcagataatcgcagcaaagggacaaagcaatagtccctttgctgcacagcatcagaatgaataacgaatattagcgtttatcgcatcatctgtgttgtatttaccgaatgcagagcgttcaacttccagccccagacgcgtattgtcgccaaaccgggcatttaaccccacaccgtaaagcatacgaccgtcttttctgccattaatctgatgttctcccgctgcatccttcaggtgaacgtcagcactgtccgtcagatcgaactcataatgcaggccggcacgggctgtcagactccagtccttaccactgaaggttttaccggaaacaacgccggttctgcctaccagaggattaacgctgttacgacgcattgagacatccattccactgtcgttccagttaaatgtttggccctgcagtcttccccagaccagttccgcctgaggttcaacaaacgtcgtatctgtcagatgataacggtatccgacttctgcacctgcatacagtgaatggctgcggaagttctgtttaccagctccggcaaagttcaggtcatatttgttttcattgtgaatatatttggcaatcaaatcaaagtaagcgccggaccggaacagaccactggcatagaaaccaccaccccatgattttgttttaccgctgtacaggcctgctgacgcatctgtgtcagtgtaggtggccatcacgccggtaaacaggtccatacttcccagttcgtgcttacggtcagcccccatctgcagcagggtatagtggtcagtgaaaccgccatcagcagagccggaaccgttcagcagacgcacccacgtaccggcttcgccgttaatatccctcaaatcgcccatgcgtttgttcaggttgttaacttcagtgatgaagttgttatagctgatgtgcatgaatgtggcggcagccttaccctggccgtcgttacgtgcaacctggtaaccatcgaggacccactcttttttcccgtcctcttttctgacactaagggtgggggtgacatcactgaatcccacaacccgtgttgatgccctgaacagattatcagctgtcgcttcaggtgcgctgaccagtggaatatcaagcgtgtccttgtcagagggttttttcaggaagttaacccagatgctgttgtcatgacctgttgccgacttgtttatcaccagtttgtctgccttgttaaggtctgtacgcatgacaaatgctgactgaaccgcgtccagattatctgttgtcagtgtcgtgaacgatgatgttcccccgttaaaaccgactattgtccggttaagtttcatatttcctgccgtggagtttccgttcatcgaccactgggtgtctgtcatgctgacggtggcatccggtgcattcaggctcccgctccaggtattgcggtacccgttaaacaggctgtacaacatctgattctgaagagtcaggtcaggactcagttccccttcccctccgagggtgacagtccctttatcctgaacattgatattacctgacaacatactgtacggccccacgttcaggcgggcatcgtctcccttcaggttccatgaaccggcataatcgtatacaggtaaaagtgtgtgagatacctcatcaggacggctgttcagactcagggtggcatcagaaatattcaccggaccgtcagaaacaaaactctgactggccagaacatttgctcccttgttcagattcagggcggtactggtcagcgttgagttctccagaacggcactgtctgaggagatattcacggtactgttgttcgcctgtattccgccattgaatatctcattgatattcagcactgactgattatccaggttgacggtgccgttgaagacgcttttatctgcatctttagttgcaacagatgtgccttcttcaagggtaaatgctgttccctggccatcttttttgtcgataaatacccgactgtcgcccagcgtgacgctggagttatctgcctggatggttgtgttcagtgtggcattgcggcccagaccaaagtctgtatcttttaacacgagcgaaccaaagctgaacgtcctgttctcccagtcatcctgtgtaaatgaggtgggctgtgtcagaacggaattgtcgcccagagacgagactgtatttgcaatactctgagacgttgaagcatggataaccgggtggccctgaatggtcagacgaccgttttcctgagtaaatgtaccggacatattcgctgagccgtccataaccaatgcgccggttgtacccggggttgctttatttgagaaattaatatttcccagcaacttgccatgatacagataccctttattattaattctgtttgcaagcagtgcctgtgcactgttctggtcatgtccgacatattcccagtgctcgttactgacctgaccggtagggaaccagccataactacttgttttcaggataaaataatcgacggtatgagtatagggattattataaatatataatgaacctactgttcccctgtttgatgatgaccattcattaacttttacgtctgccggacgcgtctgataatccagagtgatattagccgttttatcactgctgttaccgagagttgcgccataatcggcggcattcagcttatgaaatgtcaggtcattcccgttaacatccagaacccccccccggtagccccaggatatattgtccggattaacctgctggttgtctgccagcacgactgtcgggcggccgctggcaatattcacgctactgaatgcctgaacgtgtcctgaactgtcagcctgctgattgaggacaacggtcccatccccgactttcaggccgccctcattaacaccggttccctgtacaaccagggttccttcgccgattttatgcaggttgtcacctttcacaccattaacctgccagtttacggaggcatccttgtccacaataataccggccccggtccaggtacttccgtttgaagtggtgacagtgtagtcatcagtaaatgtcagtgaaccggcaccctgcgtgacagagttttccaggtcaatctgaccattatgtcccaggaatgtcagatttttacctgcgttcaggtcagaacctttttgcccgtgcatggcatattcatcggaaccctgtttcagagagccagtgccggtgctgctgtcaaatttccattgcaggggggcgccggatgaggcattaaaaaagacgggagcgtcattatcctctgaatagatctgtgagagaaaactctgaggaataagagaatatatcaaattggtcccccctcctactcccgagtaaacaccgaccagttcccactgccctttggccgtattccagccaaataatggagaaccactgtcgccggcctctccaaaagagggcaggatgctatgatcatgtatgttgccccccatatacagctgaatgccgtctgagccgtgataaaagaatgatgtcgggagtattcctcctgtcagataaccatacccacctgttacccaatgtcgcttaccctgactatcctgaatatactgacttcccgaaccagccctgtagaatgccgagtattttgaagggttcaatatatcagctgttgatgagctggttacggtagccggagcaacctcagttacgagcttatcaagtcttggtgtgtggagatcagatgaactgtgttcattacgatccacaatatggtaactgttctgaccatcaccgaagctgacgctctgatatcctttattatgttttacactggctatatattgcgggttaattaatgttgcaacgccgggatttgagcttacattcacactgctaaaatcaaccatgggcgctttatcaagatgtcctactaattcccctttattattaaaaataggaatgtttgttgcgccagcctgaaactgccctttgttttctgcaaagtcgcggtatgtctggtaaggattgttgccaccaaccgttgatgcaccagcaacggttgggagtaatgcagatagtgccagagaggtaagtactgaaagtctttttcctctgcgggtactccctttacatacccttcgggctagttcagagacaacctttactgtgttagtaatataacaatattttagagcgtatattttattcatagtaaatgattccggaacgtatattccaaagttacattaataaccatagacaatttcaaacgaaagtattgttgaattgcgcgctaattattaattagctatataattataaatgtgatatatgtcacatttatttttgcttaaaactacaatattttgtagttgcacgcattctttgtctgtggttttcgttggtggtaatgaaaatgttgtttgctttttctcaggtgttttgacttatgacttaaagtcataaaatatgcgacgctaatacaactacagaaaaatggtatatatggatatcgacgatatttgttgatttttattttaaattgcgtggcggttcagagcggatatatatatcaccataccatcatctgtttttctgaagttcagattagttttaacacactgttttccatcttcgttgattacaacagtctttttaatgtatttacgaatggcatcattcgacgttctaacggatttagtcgatggtggggtaattaataaaacatttgctgtaatcaaaaacggtaatgtcttcaattgatagaagtttctggtaatctactggtatttaaggttttccatggctaccgttactgttcattgtccgcgctgtaattccgataaagtttatcgacatggtcgtagttgttcccagcatgagcgtttccgttgtcgttcatgtaaacgtgttttccagctcacttactcttatgaagccagaaaacccggctttaaggagctgatcgttgaaatggcgcataatggcacaggggccgtgatatcgccagaacactgaaaatcagcatcaataccgtcatacggacattaaaaagctctcgccccagcggataacatctgcgtcagtcagctcacgctgatgttgcccttatctgtgaacttgatgagctgtggagcttcgttggcaacaaggcgcaacaacactggctctggtatgcgtagaacactaaaactggcggtgtgttggcttacactttcgggccacggaatgatgaggcctgtcgggaattgttagccctgttgactccgttctgtatcggcatggtggccgcgatgactggggcagctacgccagagaagtgccgaaggagaaatacctgaccggcaaaatcttcacgcaacgtattgaacgtaacaacttgaccctccgcacccgcatcaagcggctggtaagtaaaacaatctgcttctcgcgttccgttgcaatccacgaaaaagtcatcggttccttcattgaaaagcacatgttctactgattggaagcactacccaacgttcaacttatcatcataagtataaaaatcacaaaatgggaggtaagagtctttacctggattgtctcgaaatgcaaagtgtgcttgctttacaactaaatctgggggtatctaatgattgcgtaatagtttttttatatacatatcaatgtcttgctttttacaatctgtttatattatccattttaaatcaataggttacacatcgttaataccttccttattttttgattgggacagatttgggaccgatgggttcaggatcgaatctatttaccgtgcgtgttcggtaaggtgattaggtgcgagatgagcatatcgacgaaccatttcgagagtttcctatccgctcatttttaagtgcaagcagggaaacaccggaccaaaccaatcagctgttcgaaaatggcaagcggattaatatgccatggcggctttgagccgcacgcatggggtgtggcaagcctgatggatgttactgtgcttgtggtggcgtctttgctggtctggttgttggttaatcgcgaaaatcattatgcctgaggaataccacaggacgttcaggttttgcataaaaaagcccaccattaaggtgggcaaaaggaatgatttatattctctgagagaaacattacatttctccttgtcacttctaacataaaaatatggagaaataatggagcttatattaattggcgattaggtaaccatgtggttatacaaaacaatacagttctttacatttgccttgttttatgaatactcctaaagaggtgtataacataatggtacaagcagggtagatatgaatatatttgaacaaactccaccaaaccgcagacgttatggtcttgctgcattcattgggctgattgctggcgttgtttccgcatttgttaagtggggggcagaagttccattgccaccacgtagtccggttgatatgtttaatgcagcgtgtggtccggaatcattaatcagggctgcaggccaaattgattgctcccgtaactttctcaatcctccgtacatttttcttcgggattggttgggactgacagatccaaattcggctgtttataccttcgccgggcatgtctttaactgggttggtgtaacgcacataatcttttcgatagtttttgccgttggttactgtgtggtcgccgaagtatttccgaaaattaaactttggcagggcttactggcaggtgctttagcgcaactttttgttcatatgatttcattccctctcatgggacttacaccacctctctttgatcttccgtggtatgagaatgtctctgaaatttttggacatttagtctggttctggtctattgaaattattcgcagagatttacgaaacagaattacccatgagccagatcctgagatccctttaggctcaaatagataatgctttgaatgataaaaatggcgcaaatatagcgccatttttataggttaaaaacgttgcttttcatattctgatgcggacagtcagtgatcatatcgcgctacttcaggatgatgtagatccggagaacgctacagaagaagaggcattgttgctggaaaatggaagaagtttcaggttttgttgtccctgaaaaacgaagccccgctattacagctggcggggcaatgcaattaattattgtatatttataacggtgttagcccgtatttagctcttgcacgattgcaagcctcattgacttctccgttctcaccagacatggcgaattctctgcatgtggacgatcgattttcatatatcgtgcagcaggcattttggcccggtgttcctgcaagggcaatacatcggggatttttctgattagtaccgctcatgcatcggtgaaaaggggatatttgttcagtgagcctggcgggaatggtaccgccagcatcgtcggcttcggcccagtaaaaagagatgcggaaaaatgcacaacaggcaccacacgtcatgcatggattcagattgctcataattcaccagtacagctataaatcgtaaagagaactgcggtacgtcgtatgcagggacgtatcgcggttggctggtgtactttcgatagtgtgagtattgaatgatttccagccgttaccgattttacgtcctaattagtgaagaaaccactcgttagcaggccgcctggtacctttccgtgtctcctgaacactgtggtgtgcatatgagaaagctcatcggtgacattgacgatcgcttccacatcatttaaacgatttttgagtctctgaggtggaattcttccctcgtccgatggataagtcttagtccgccgaagggggcttagccggacaggaatcgctaatcttaatgaatttgtcgttatagaccagatagtgattccccggctgacgtaactcaggctgatgaaccacgtctcccggacgtagataccaggcatcgccttcctcttcggtcgaatcacatcctggtttaatcagtagcttaaaccacgtgttgccggtgttacttaccgttccggtcacctgatcgaaggaccatttaaactgaacctgacgtggtcgtactaccagaatggtatccatcaccaccaccggctccgtgctgacctcaccgccgcttgggctgcgttttgtcaggttacgagtggggacctcgcgaaatgagacccggtagtagcgctcgcggttatcccgtggaccatgatagtaaaatttaaaatactcgctctcaccagcctgcaacgccagctggcggggggcgaaaagtagttcaccatccaccggtcgggtgcgcaattcactgctgcccgggctatcaatagcactgatggcaatacggtatatccgtgcgcttttgttgttattcacgacacgtttgctgacaaagtcagtctcggacggcagtgaaaaagtcagattgccgaccgaaatcgcctgtgtcaaaggtgccgccagcatacagaccactgtcagcagggccttagttaatgttacgccacgtcgcctgaacatgaatctctcctgaagcgctgacttcgccaaaccagccgttatcatctaccgtacgcagagaaatggcgttatccattggaatcgaaaatttgactgtggtcttatccatctgccccacttcgccagagatatcagtccacggtgtggtcaaccacagcgcatcggtcatatcccgccagctatcatcgcacccggcatcgtaggtttttgtagctccgttgcgggtaataaaggaaagtgtcgccgggaacggtactttcgccttaccgtcatcggagctgaagacacaataggagcgcccgccaatcacctgcgcgggtccggtcaccttgatcagcacttcgtcggcagctgttttaccgctggtggttacgatatagccgaaatcgagtgccgactcgccgctgccaacatatccctcccgcgacggtgtctgagtatattcatcggagataatactgatgctgaaatcacggggtttgataatcagcgtgttggaggtagaaaattcataccagccagactccggtgatgtggtgttctgaaagcgaaagttgaatagatctttggtgttgatatcgctgatcccgaggttcaccatctgcttaaagaagttgctcgagaagaacacatagatcgagtctgcgctcttcatctcgttgaaggtgtagtaataggcagtattgctcaccggtttccatgaactgccattcagactgaactgcatatcgtacgccccgacggccgaggctaacgacgagttggcgatcgccgggaatatatggattgaggtgttgctgagtccgttcgtttgcagggtatagttaaccatcttacaacttaatcctgaacggctgccgatggtttgcgtccggcagtcggcattcccttcgcccagagtcggtactccgtcgctgttgataaatacttccgccagcgagtgggtatttatcaaccgcagatttgctgctttcgtatgggtgacgttgcgaacataccagttgccggaggcctgatccttacagcgtgcgccgctgctggcgtcatagttcacagaggtctggcaggcattgatggtcattgtaaagctgctgccgacgggcatttgttgcagatactggtaaaacgcgtctgacaacatgccgtgcatccatttcgcgccgccgctggtcaccgtcgcgccataaaatccactggcgtcggtggtttgcggcaggataagactggtggtcatattacaccctgcgtaccagttgatgcagcgcaagccagttaaaggagatgaaactggtgaattttccagccacatatcaaacttccagttggtataaaggccggtgttgtaaccgttatcaatgtagccgaggctttgctgatagatggttcctgaaccattgtattttaaaccggtccagcggttggcaccggtcaggcgcggatccagcgccccgccaggagtgacgaaaaagttgtcgtctgagttgttttcgacaaacacaaactcgcgtgccggagcatccgcccaggttgttttgctcactgccgctctgagcgcggttgcaggccagattagcgcaaagattatcatcgctatcagtaggttaactctcattctcttctcctgtctgcgtcaccgccgcccacgatgagaggccgctgcagaccacatcaccgacccagacggcaccgcgcgcctggttgagttccagtgccacttcgcaggttttattgccactgtagcgaaaatcgatagtggggtatttcttatccacgtccatgacaaactcgccgttttcatcggttcgggttcggccgatatggttgttaatccgtgcgttagccagtagtgtgccgtcttccgcacggatacgaccggagacggtaaccatctgcttcacctctggctcaatgacagcgacattgcctggatagagagtcagatgacttttgcgaccgctgacgatatcgtaactgtcgagtgagtttttgctgttctgcaactccacctcatatcttccatagggagagagcgggagatagttacgcttgccgttaagcgggaaaatccgcccgttgattttggcgctgatctgaccatcgttctccaggccagtgtcgaatatcaccccagcgttgccatcggtccgcccgctggcagcgatgtttttaccctgccagccgacgctgccgttggcggtcaaattggtattgatgtagccgtccgccgcgctattgacgttcagcgttccgctggcgtaacgagcgtcgaactgtgcatacgccccaccgctgagggttttgtcatcaccggtatcgccggagatggctcgtgacagattggcaccaacagtgcgaatggttccttcatcaaactgtttgcgtgctgacaggtttgccatggtgtagccgttttgatgggtcatccctgcgctaaaccagttgcccagtggtagcgagagatcgagagcgatatatttccctgtattggcgctgctgtcgccgttgttatagcgctgaataccggcccgcaggccaagcgaaccaaaggtaccgctgtagacactttgatagtaatctgccgtgtaataatggctgttgtagcggcggtcatcattgtagctgatgctgaacgtacccagcttcgaccacagtgagttcaggttgagtgtgccgccgattgcacggttgtcggcatcgctacgtcgcaattgattgccaatgcgggttttttcctggttaacccacagcgaactgaagcctccaggtagagtggcgctgatgccggcgatgttgctccatgagctgtcactggccagcatgttttgcaggttaacgttgatcgcccccccaagcggcagcgtcagacgggtttcacccaccgcctgattatcgtatccatatcccgttgccgcccagctaaacgtactcagtgagccggaggtcgaggcacctgccagccaactctctttggctggtcgcgtctttttcccgttttccgaccagcgatccatatgaaagctaccgccccatatctgccacgccagcggtgcaccgacgccacgtccccggctaaacagcttattgacccgctgggtgcgtttgctgatcacgcgaccgttaacgattacctcaacttccacatcgtaaataccgtacggtagaccccgggtatccacttcatgattgcccatggtgaagttctgaacgcttagtagtcgcccatcacgggtgagatgtacttcgcccgccgccggtaaaaaggcgatcactggcgtggccgattggctgctgtcgaagatggtggagctggcctggtttccccaggaaaggccgtaaatcttccctgctgaaatggcggtcatcggccctaaggactgcaagttccaggtgtcgagcattccaccggcaaatcggtgaccagcaaaatcgcgttcatacatcgctttatataattcactgtcctgttgaccgctaccaatcccgtacagtgagccgtcgagcaccacgtgatgttcgcgcagcgcagtaacgttattcagcgacagatagctggaggtgttgctcccgccgttacgcaactggttgttatagacgccgaagttatagctcagattactgctgagggtgttaacactggactgcccgatgtcttcgctacgtgagcgtagtacggtgcccagcgcttcgcgcttgaccaccagctgcagcagcagttggcgcaagctgagatccaactgcgcgttgtcagtcagggggatggtaagggcctcattgaacggggcgttggccagagtcgtcagctgctgtcgagtttgttcgctgacactggcgttatcttcactctcttccagctgtatttttcggatgcgtaactgtccatcatccaaccagataaaagcgctgccgattcgctgatcgtcctggcgaccctggctaccggcgagatgaatatagagcgggacgctcatgccgtcctgaagcgcctgactgaaggcctgcggaataatcaccccacctatttgctgcgcacttatgtcagcagcgctggcatcgggctgaacgaacaaaaagaccatgccgaaggcaaactgggctttcagtcctggggagaaccgtcgtaaaggcattgtcgttatccatctgcacagctatctatttcacgggaatgaacttatcaccctgccaaagtgcaacccgtcctttgttatccgccgtgtccacgcgggtaaaacgacgcgacttgcccggcatcaggtagtaattctctttacactccttaccattggcggctttcaggcaggggccgtaggcgaggatccgcaacgtcgcatttcctgtatttgtcagggagccgttggcgtactgaaagtggtagttcgcctggcggggtgcgacgaccagaatggtgccgatgcgggcggaagcagtggccacagcgctacggttggcattatcgcgctgcgcatcactgagggcctgatcaaaccagacaatgcggtagtagcgctctttttcatctgctggtcccttatagaagaagcggatcacttcgctggcttgggcgggtagcagcaagctggcgggagtgagtagcaactcatccggcttgtccattgcgataacctgcccgtcgtcaagcggtgaagagagccgttcgagacggatattgatgaggcggccactgtcggtactgttttggatcgttttgctcagcgtgctgctgtcactgttcataaacgatgatatatcgccgacatccagcgcctgggccggtgatattccggaaaacagcagagcgagaggcagaaggtgctttttcataacaattccgtccaggaataaagcaggggggtacccctgctggtacatcagagagattaactggtccaggtagcgtcgaactgtacgctaacgtcgccgctccagatgccttccggtagagtgctgtaatcggttactgcggtggtaccattggtggtgccgctgatgatggagaaagtgaaaccatcctgtgcggtggtacgattgctggcattgtaaccgttagccagtgggctaaggttgccgcccagtacgccgttggcggtatcgatcatcacggtatcgccagttttttcgactgccgcgccgttataatccacgcccacattcagtgtggaacctgaggtatccaactgggttaaggtgttggtgataaggcgtgaggtcagtttaaaggcggtagccgttgagtcaccctcgatagccacgtcaaatagacctttttgtgagttaaaacctttaatgccttcggcatactggaacgccaggctaccgagtggcgtcacaaccagcttactggtggtgtcttttttggctgttgctgaccaggtcgctacagcctgagctgttacgtcagcagcctgcgctacacctgtaccggtaaacaccgttaccagagctattgccagaaccttttttttcattgcttttcttcccgagttgaattgaggacatgaagtcccggtgagtcattttttaaaactaacttgcctggagtttactgaaccaacttatataattttgagtacagcttggcctctgcattccgccgatgggtatacactgtcttcacactacaattttcaattctggcaatcgatttaggcagcattccctgagccgtcatgcggataatttccatttcccggtcagtgattttatctttcttaatatcttttctcaggaacctgccattaatcacataggccagttcttttctaatatcacgactcagtccagcgtataccacgcccctaatattgctgttgtaataccaataatttgctaaggcttctgactttctggccgcaatcaatacgacctgtttcccctttaccgcggataaccactcattatcacggtttataaactcagttaaagaatccgtattgagattgataaacacgaaatcttttctgattttctccagcgatagataaattaatctgtcgatatccacaatcagttcagatagtcctttatagaagtaggcgtcatggggagaccagatgtatttatcagaacggttttgacattccatatggtttttaacctcatagtccctgctgtaatcattttgccatgtcactactttccaaacctgtaatttttacaggtacattcagtttctttagtaaatcggaagtaaataagatacgtagcacatatcaatataggttaaacgagattaagttttaattatttcgattaggtttaaatttatgtttttttcctgatgagtgtcaatatgtgaacagaaaatgaattccatggttaagtcaatatttacaaaaaatgaaaatattgcttttttgataagaagaaaaagacattcagtttcataaggttattggcaatataacgttcaattcttacttgcattttatattagccaggaactttgccctgaggtgttaggaatagtcttaatgtgttgtgtaatggactagtaaaaaaacaagtttaaatgataagaaatagaatataaaactatcataagtcataattaaagatgatttgccaatcagtaaggtgttttaatggattaacatgccgcacaaaatggttatgggtgttcatcccaataagtgatgaaaaattaaacaggtgtaagtacgtcatctgtccggtaagccccccaagagccaaattaagtgaagttaaacgaagactgccagttgtcacaggaacgatggcctctttgccagggcactgcattcagtcatctgtacgcgttactctaactggcactcgaacgtcggcgatggggttaccgatggatctggccgttcctgtggcgtaaacgtttttatgtcagtaccaacagatttaccacatttatcatcttaacagtttgagtgtaaatgcaggctgcgtcgcaaagggaggaaactgagtggcgtgttcagtctaaaatagagttgatgccagcatacagggcgcagctggtcaacaagtcaacattaatataatggaatattcggagagaaacgtcaggcagttgaccttaaatgaacaggaagatacatccccaggaaaattaatgctggtgtaataaatacaccaacattaatccggtctgattattaatcagacaaatatcgttaattcgtcgaattttaaatcaacgttttttcttacgaccctgaacggccttaaaacgtggattagatttacaaatcacatacagccgtccttttcgcttcacaatctgacagtctggatggcgttcttttgcggtacgcagagagttaaggactttcatcatgccccctttttcgtgctaacaaaacgaccaaaacgttgggtgaaccgtgcaacatttccttctgatgccactgttctcagcttccctgtatagaacgggtgcgatttcgaagagacatcaattgttacgtacggatacgttacgccatccagctcaatctcacggtctgttttgatagtcgagccgattttaaagtactcatcaacgctggtgtcgtggaacaccacagtacgatactcaggatggatattgggtttcatcatttttacctgttatgttataacataaccgtaaagatacatgctcatccggatcatttcaacacccaatcactgtgactatttgtgggatgtggaatttccgcaacggggaagtctggcattgttagcagccattggcgacgctcccataaacgcctggatgagtgattgatgatggtttcgctgagagtatggatttttcgagaatggaggctatctccactttactggccgatgatttattgcagcatgattgattacctgacaatgtgtattcctctcccacggatataataattacttacaaaaaagggagaggatgcatattttaaatatcactgaagtgaacagtttattgccgttattaatagaaatggagaaataaataggcgtattctacaattgcgacaaaaacaacgatattaatcagtttatgactgatttgctgtactttattctctttcattggtacttcctcgctttaaaaaagagtgcacttcgtaagtgcccttatataaataacgagtttggtcaaccaattttttgacatgtatcacaaatttgaatagatgtattacatcggctatcttttattgccccaatgtcattgatatatgtcgcctgaaatcagttacgggaatgagtctgatctcaagactggcccagtcctggcgttgattggcgctgaggagcatatcgcatctcatcgtaacgtcgtatctcctggggtgttatacaagatatcgttgtaggtaaccagggagaggaattgagtctattaaaccgtcaactatgccggatacatactggattacactgcaggcacgccttacgagagaacgtgccgcagtgacgggttaattatctgaaagaatttgcgaggctgtatcggttactcattgatttgatagttttactctcgggagaagtaatcgatatttaatccattaacggaaaccagccagttcctttcgatgcctgaatttgatcccatagtttatccggaatggttaattcaggaacgcgttgtggattaagggctgtttgaatttcatgacttctacctgattcagctaaagtcacccattctggatttatcaccagccctttaccggatcgcaacaagtggcaggccagcgggaaattgcttcttgagcctgagacggtgtgcgtattttacctgcggcgattacccggcactctgcctgcaatatgatttaaaatcaattcaatagttcgggggccatttggcagactcaacagggtagctatcgttaatactgaccagcgaggtatgtatatacgaaataccggatgaaatgagccgatcaaggagtttataagtatcctctatccgcagcccccctgttacagattcttcaggagatattctgtaaccgatagcaaagggctttgtcgcatattcatagactacattttttacttcctgtaatacggccagcgggaagcgcatacgtccttcaagatctcctccccatcggtcattacgctggttaaatagaggggagaagaaattctgcagaaggaatccgtgcgcaccatgaagttcaacgccatcaaaacctgctttaatcgccctttttgtgacatctccgaatgctctaatggtttcctgaatttcgttttcagtcatttccctgctttgtaccactctcttcataaagtcaccagattttacgcttgatgcgctggcactaataacatcgttatttggcacaagctccgggatggctttattaccggcgtggaaaatctgcaaaatagccggagcaccgccacttttggctgcagctgctaacttttcaaggctgttaatgaaacggtcgtcatacgcggcaaattcatgagtaaacccaatgccgcttggcgtgacataggtacatcctgttattactaaaccaacattttgtgagcgacgtttataaaattcgagttcttgctcagagatggttccatcaggattagctgaccaggttgtcataggagccataacgatacgattacgtagctttattttttctgtcagcataaaaggagaaaacaatgatgggtgtttatttgtcataacaatacctcaaatgtttatctgattttaatgcgtataatcttaataagttgagttgctgctttttgatgcttttttctttaatagaattctttttgagtaatttcattattgtcgtgtagtcaataaaggataaatgtcagggagataatgaatctccctgcaaggttattacaaatgtgttttgtaaaaaggaattaatttatcgagcgcctgtttcacaggttctggcttatcatacaggtcgtaatgtgaataaccttcaaccacgaccagttctttatgttttgaggctgcacgaccaataatttcgcagccgtcacgataggcaccaaaagcgcccactctatcgcccactacaaccattagtggttgagttaacaggacttctgcaagatgaaaagcatcccagcccacggcaacagtctgatgtgaaaatagcgaacgatttaccccattaggcgcacagcctcgtggcgaacgataatattctgttgcttcaaaaaggtctatttctgttaatcccgcttcaagagctgcttccggagaagaagggagcaaatcatctacgcgaagttttgcgccgttagcttcgtctgttctttgttgcgccattgcttcgagtgctccgataggattaaacgctgtaaatccctcacgcataagacgcccgtagtttgcacccgtgacagtaccaatggctttaatccgacgttctgtcattgcggcattaatggcatatccacctccaccacaaatacccagtacaccaatacgcccggcatcaacgtaaggtaaggtggtaaggtaatcaacgacaatgctgaagtcttttactcgcattgttggatcttccagataacgcggttctccaccgctgcttccctgaaaactggcatcaaaagcaatgacgataaagccagcttttgccagggcggcaccatacacactacccgatgtctgttctttgcagcttccaattggatgggcactgataatggcaggatactttttttcactattaaaatcgtcagggaaatagatatcagcagctatatcccagtaagtgtgttttatcgaaacagttttcatttcaagctccagggatttgcctaaacagatttaaatatcatttctattatccgcaactggcattcgtgttcatatcgcgaacggcgtaatagtatgacttgtattggttatcatcaatggtctaatatctatcacagtgttaagttaaggtttacaatgatgaaaatagagccttcaattttgccttctcttgcctggtttgcgctgattgttcgtgccggcagtttttccagagcagcctctgaaatgggtattacgcgggccgcattgtcccagaatttaaaatctcttgaggaacgtcttaacaccaagctgatataccgtacgacccgcaatatgtcgcttactgaggaaggacagcatctgtatgaagtgctggtgtcggctttggggcaaattgatgatgcgttgaaagatgtcggtgatacccaacttgaacctacaggactgttgagaataaattcctcccgtgttgcagcaaggatgcttgttgaacctcatattggcgagtttcttactcgttaccccaaaacaaagatagaactcattatggatgacggtttatctaacattattgcggacggctgtgatgtgggcatacgtcttgagcaaggactggatgagcatatgactgccgttcctgtttctccgcttattaaactggttactgtggcatcgccagattatttaaaagaacacggtattcctgaaactcctcaggaattgagtaaccataattgtcttcggttgcggcataaaagtagcggtgcactctcagcatgggagttttcgaatgttgtggggggtaatgaagagttcgaaatagaggtgtcaggtaagtatatttctaatgatgacgaaagcatgatacgaatggcgctgaatggaacgggtatcattcaacatctggattttgcaatcgctgaacatatcaatgcgggcaagttacagccgattcttgaggattgggccgtttcatttcctggattttatatatatgtttcatcacgggtgagaatgccctctaaagttcgtgcttttattgattttatggtggagaaaagagtaaaaatagaaagttaatgatgtgtgtcagaatatcggtaagaagaatggcgcaatcgtgaggatacgtttattcataataaatctcctgaaagtttagaattattttcgatacagccagattatcattgttactaataatgtggttaaaataatagcatctatgccccccttcatgagtgtctgtgaagaggatgcttctacaaggaaatcgccaatgctcaaagaaaacttcaacgaactgcaaatctttcttgtggtggcaagagagcgaagttttaccaaagcagcgggcaaactcggcgtctctcagtctgcacttagccatgcaatgaaggctctggaggaaaggctcaatatccgcctcctgacacggactacccgcagtgtggctcccacagaagcgggggagagaatcattgcctgccttgaaccgcgtattgacgagcttgaacaggaactggaatcacttattcaattgaacggcatgccctccgggaatattcggttatctgccggggaacatgccgcgcgaagtctggtctggccgaagctaaaaccttttctcagagagtatcccgaaatcaatgtcgaactggtggtggataatggttttgtcgatattgttgaaggccgttttgatgccgggatacgactgggtgaaaatgttgataaagatatggttgcagtcaggattggaccagatatgcggatggctgtggtgggagctccggcgtattttgctgcaaaccctgcgcctgaaacgcctcatgagctacaaaatcatcgctgcatcaacatgcgtttgccaactgccggtgggctttaccactgggagttcgagcgagaagggaaaccgcttcgcgttaaggttgatgggcaactgacgtgtagtccattgccagaaagaattgatgccgcgttatcagggtttgggatcgcttgtgtccctgaagacatggttcaggagtatatagagtcaggcaagcttattcaggtgttacaggagtggtgtccaacttttcctgggtattatctttactaccccagccgcaagcagcatccgccagcttttgcgttgttgatcgatgcgcttcgctacaccgaataacgggtcctttatcctggacccgtttgggtattagcggcctacgcgtgcctgatgttcaggcgagtaacgttcaccgacgattttaattgtttccagcgcctcgcttatctgctgcgtatctttctgcgaaagaacaatgtcagcagcggccaggttttcttccagccggtgcagtttagtggtgccagggatgggaacaatccacggcttttgtgctaatagccatgccagtgcgatttgtgcagacgttacccctttctccgcagccagttcacctaacaaggtgaccagtttttcattggcttcaatggcttgtgctgcgaaacgcggtacggtgctgcggtaatcatctttgccgaaagtggttcccggcttaatcgcccctgtcaggaaacctttacctagtgggctgaaggggacaaaaccaattcccagttcctcaagcaacggcagaatttcctgttcaggctcacgccaccacatggaatattcgctttgcagggcggtgacaggttgtaccgcatgtgcacgacgaatggtttgtgctcctgcttcagacaggccgaaatgtttgaccttaccttctgcgatgaggtctttcaccgttcctgcaacatcttcaataggaacatctggatcaacacggtgttgatacagcaggtcaataacatctgttttcagacgacgtaatgatccttcaacggcttcacggatatgttccggacggctgtttaaaatctgctgcttattatcattgccgaaggtaaaaccgaatttagtggcaattaccacgcggtcacgaaacggttttaaggcttcgccgaccacttcttcattcagatacggaccatacacttcggcggtatcgaagaaggtgacgccacgttcaaccgcagcacgaataagttcgatagcctgacgggtatcggtcgccgggccgtagccgtggcttaagcccatgcaaccgagcccaagggcggagacttcgagtccggatttacccagataacgtttttgcattgaatgaatacctcttttatcgcggcttaaacatcaagtttgcggccagtcagccattccaccattgcgggatcgcggtgagagaagaacgcgctggttgcggtatccagggcggtaatttgcagcatatcttcagggctgagttcaaaatcgagaatgttgatgttctcttccatgcgttcttttcgcactgattttgccagtgaaacaatgcctcgttggtagatccagcgcagaacaacctggcccacgcttttgccatacttctcgccaattgccgtgagaacaggatgctggaacagaccatttttcccttccgcaaacggtgcccaggcttctggctgaatgccacgactttgcatccagggaacggcctgtagctgctgattgaaagggttaacttcaacctggtttaccgccggaacgacgttattaaaagcgataaggtctgccagtcggtcaggatggaagttactgacgccaatagcgcgaattttaccggcctgttgcagctcttccatggcacgccaggctccgtggacatcgccatatggctggtgaatcaagtacaggtcaacgtaatcaagttgcagtcgattcagagagcgttcgaactgggctttggccccttcgtaactggtatcctgcaaccagagtttcgtggtgacaaagagttcgttacgggcgataccgctttgtttcagtgcgttcccgacctggatttcattttgataagaggcggcggtgtcaatcagtcgataaccgctgttaatagcgtcaatgaccgctctttcgcattcggcggcatcggtcatctgaaatacaccaaagcccaacaggggcatttcaataccgttgttcagttttactttttgcatggtgttatccttccgttatcgttcatgagaagcataacgtaaagggaagagctcgattagacggcaggatttgtcaggggttatgaacaaaattcataaatctgtttgagggttgagattagtcgtgcaagttcgatatccccggaatttacagtccgatgaataaaaatgaatgtccataaaaaatatattggtttatcccagcgtatatacttacttcgacgtactcccaatagcagttaattaaaggcgggtcattattattcactctgaataatgaattattcactgcccgcagagtaagaaatataacttaagtatctatttaatgacttgcacaaaaagctaaatttttacccataaataaaaatataatcccgcgcccaaccacctgatgagtggctacagacactggatatattaggtggcggtgtactttcttacataaaggtatttccttttctgtggaaaaggaaaccgggaaatccccggtttttctgacaagcagacgccattatttgtgtctgcctatgttcgttaattcgttcatcaggaaattatctcaatgtcacgttataaaacagacaataaacagccacgatttcgttattcagttctggcccgctgcgtggcgtgggcaaatatctctgttcaggttctttttccactcgcagtcacctttacgccagtaatggcagcacgtgcgcagcatgcggttcagccacggttgagcatggaaaatactacggtaactgctgataataacgtggagaaaaatgtcgcgtcgcttgccgctaatgccgggacatttttaagcagtcagccagatagcgatgcgacacgtaactttattaccggaatggccaccgctaaagctaaccaggaaattcaggagtggctcgggaaatacggtactgcgcgcgtcaaactgaatgtcgataaaaaattctcgctgaaggactcttcgctggaaatgctttatccgatttatgatacaccgacaaatatgttgttcactcagggggcaatacatcgtaccgacgatcgtactcagtcaaatattggttttggctggcgtcatttttcagaaaatgactggatggcgggggtgaatacttttatcgatcatgatttatcccgtagtcatacccgcattggtgttggtgcggaatactggcgtgattatttgaaactgagcgccaatggttatatccgggcttctggctggaaaaaatcgccggatgttgaggattatcaggaacgcccggcgaatggctgggatattcgtgctgagggctatttacctgcctggccgcagcttggcgcaagcctgatgtatgaacagtattatggcgatgaagtcgggctgtttggtaaagataaacgccagaaagatccacatgcgattaccgctgaagtgaattacacgccagtgcctcttctgaccctgagtgccgggcataagcagggcaagagtggtgagaatgacactcgctttggcctggaagttaattatcggattggcgaacctctggaaaaacaactcgatacagacagcattcgcgagcgtcgaatgctggcaggcagccgctatgacctggttgagcgtaataacaatatcgttcttgagtatcgcaaatctgaagtgatccgtattgctctgcctgagcgtattgaaggcaagggcggccagacggtttccctggggcttgtggtcagcaaagcaactcacggtctgaaaaatgtgcaatgggaagcgccgtctttgctggccgcaggcggaaaaattacggggcagggcaatcagtggcaagtgacgctcccggcttatcaggcaggcaaagacaattattatgcgatttcagcgattgcctacgataacaaaggcaatgcctcgaaacgtgtgcagacagaagtggttattagcggagctggtatgagcgccgatcgtacggcgttaacgcttgacggtcagagccgtattcaaatgcttgctaacggtaatgagcaaaagccgttggtgctgtctctgcgcgacgccgaggggcagccagtcacgggcatgaaagatcagatcaagactgaactaaccttcaaaccggctggaaatattgtgactcgtaccctgaaggccactaaatcacaggcaaagccaacactgggtgagttcaccgaaactgaagcaggggtgtatcagtctgtctttactaccggaacgcagtcaggtgaggcaacgattactgttagcgttgatgacatgagcaaaactgtcactgcagaactgcgggccacgatgatggatgtggcaaactccaccctgagcgctaacgagccgtcaggtgatgtggttgctgatggtcagcaagcctacacgctgacactgacagcggtggactccgagggtaatccggtgacgggagaagccagccgcctgcgacttgttccgcaagacactaatggtgtaaccgttggtgccatttcggaaataaaaccaggggtttacagcgccacggtttcttcgacccgtgccggaaacgttgttgtgcgtgccttcagcgagcagtatcagctgggcacattacaacaaacgctgaagtttgttgccgggccgcttgatgcagcacattcgtccatcacactgaatcctgataaaccggtggttggcggtacagttacggcaatctggacggcaaaagatgctaatgacaaccctgtaactggcctcaatccggatgcaccgtcattatcgggcgcagctgctgctggttctacggcatcaggctggacggataatggcgacgggacctggactgcgcagatttctctcggcactacggcgggtgaattagacgttatgccgaagctcaatgggcaggacgcggcagcaaatgcggcaaaagtaaccgtggtggctgatgcattatcttcaaaccagtcgaaagtctctgtcgcagaagatcacgtaaaagccggtgaaagcacaaccgtaacgctggtggcgaaagatgcgcatggcaacgctatcagtggtctttcgttgtcggcaagtttgacggggaccgcctctgaaggggcgaccgtttccagttggaccgaaaaaggtgacggttcctatgttgctacgttaactacaggcggaaagacgggcgagcttcgtgtcatgccgctcttcaacggccagcctgcagccaccgaagccgcgcagctgactgttattgccggagagatgtcatcagcgaactctacgcttgttgcggacaataaaactccaacggttaaaacgacgacggaactcaccttcaccgtgaaggatgcgtacgggaatccggtcaccgggctgaagccagatgcaccagtgtttagtggtgccgccagcacggggagtgagcgtccttcagcaggaaactggacagagaaaggtaatggggtctacgtgtcgaccttaacgctgggatctgccgcgggtcagttgtctgtgatgccgcgagtgaacggccaaaatgccgttgctcagccactggtgctgaatgttgcaggtgacgcatctaaggctgagattcgtgatatgacagtgaaggttaataaccaactggctaatggacagtctgctaaccagataaccctgaccgtcgtggacagctatggtaacccgttgcaggggcaagaagttacgctgactttaccgcagggtgtgaccagcaagacggggaatacagtaacaaccaatgcggcagggaaagtggacattgagcttatgtcaacggttgcaggggaacttgagatcgaggcctcggtgaaaaactctcagaagacggtcaaggtgaaattcaaggcggatttcagtaccggtcaggcgagcctggaggtagacgccgctgctcaaaaagtggcaaacggcaaagatgcctttacgctgacggcaacggttaaggatcaatacggcaaccttcttcctggcgctgtggtcgtctttaatctgcctcggggcgtcaaaccgcttgcagacggtaatatcatggtgaacgccgacaaggagggtaaagcggaactgaaagtggtttccgtgactgccggaacctatgagatcacggcgtcagcaggaaatgaccagccttcgaatgcgcagtctgtaacgtttgtggctgataagactacggcgaccatctccagtattgaggtgattggcaaccgtgcagtggcggacggcaaaaccaaacagacgtataaagttacggtgactgatgccaataacaacctgctgaaagatagcgaagtgacgctgactgccagcccggaaaatttagttctgactcccaatgggacggcgacaacgaatgagcaagggcaggctattttcaccgccacgaccactgtcgcagcgacatatacactcacggcgaaagtggaacaggccgacggtcaggaatcgacgaaaactgccgaatctaaattcgtcgcggatgataaaaacgcggtgctcgctgcatctccagagcgtgtagattctctggtggcggacgggaagactactgcaacactgacggttactctgatgtcgggtgtcaaccccgtaggaggaaccatgtgggtcgacattgaggctccggaaggggtgacagaggcggattatcagttcctgccgtcgaaaaatgaccatttcgcgagcgggaaaatcacgcgtacatttagtaccaacaagccaggtacatacacattcacattcaactctttgacatatggagggtatgaaatgaaaccagtgactgtgacaattaacgccgttcctgcagatactgaaggcgctgaggagaaataaaaacgacgatgtaataaataataatggcgttgacatgcgcagcgccattatttactgaatacctaccctggcaccgattagacggtggcagggtagggtaaatcttatgtgatggagttacaggctaaaccgggcgaacggggataaaaatttcgcaaacaatgttattgctatcaatttcgacgaagttttcattgtaataaaatcgctcaatatcactgccgttcactctggctaaccccctggcaggtaattccatcagatagaggtttcgcgcccattcagggtagtgctcccactcaccttcatagcggaaagagacatacagtcctcggttaattgtccactctttcggcatctctgaatcggtttgtttgcataccgtaccggcaaaagtttcaactgtgagcaaatcgaccgattttgttgatggttcgaacgtggagacgaaatagatatccgtcttaaaattcttcatacatctgactaaatgatgacgtcgcagtttgacttcttcatccggtaatttattcgacacttcaatatcatatttaaatgaattgccaaaaataggtgtctcaggaaagttgactaatctacactccgtcttttgctgttgacgtattaaaaaagaagggaagatatttgcgagatcccaataatcacggtggcggtattcacggggagagcagccgaataactttttaaattcgcggctgaatgactgctgtgaatcaaaatgcaaagagagtgcaatatcaagcatagatttcgcggagagccggacaagaatggcggcacgacaaagccttcgtttgcgaatgtattctcccaaaggcacatgcatgaaatttcggaacagaagctggatgttgcgtctgctgtagccagatttctgtgcgatatcttcgattgaaatagggtgctcaagattgcactcaatccactccaggagctgctgtagaatcttctgcctgatcatcacatactccgttaattctttgtcatatcgcacattttcgttatgtcctgggccctaagtgtatcaaaaacagcaagtcccaaggcaaaagcactgatagcgtctgcttcattgccccaaaaatagagaggtttcagtcctacattattaatgaattttttgcataagtgatatcaaaatccacatactaatttgaggttacgttttaacgtagactcattgttcatacctaatggagggactgacagtggaattttccgtattaagtaacaatctgaaaatgccgatgatgggatttggtgtttttcaggttaccgataaagacgtgtgcaaacagtcagtgttgaatgctatccgcacgggttatcgactcatcgacactgcagcggtatacggtaatgaagatgccgtcggtgaagccgttcgtgaagccatatctgaaggtttatgtacccgagaagagttatttataacgtctaaattgtgggtgcaggatatgttgaatcaggatattgcagcagcaggtattgaagcatcattaaaaaaatcggggctagaatacttcgatctctatttattgcaccaggccatgcgcgattattttagtgcgtggcgtgcactcgaagatgcctatgaagagggcaaattaaaagcgattggggtttccaatttctaccctcatgttctggcgaacttttgtgaaacggtaagagttaaaccgatggtcaaccaggtcgagttgcatccctattttgcccaaccagaggcgctggcaaccatgaagtattataacgtgcagcctgaagcatgggctccgttaggtggtggacgacataaaccctttgaaaataatctgcttcagagtattgcagatgcccatcaaaaatcgatttctcaggtcattctgcgttggaatattcaacggggagtggtcgttattccgaaatcgacacatcaacagcgtatcgaagaaaattttgctatttgggatttctcactgacagagaaagaaatggcgcaaattagttcgcttgatttgggttatgttggggaatcggtaaaacattttaatcctgagtttgttcgtggttgtcttgctgtaaaaatacatgattgatattaatcacttattttacctgagacgacaagaatcttttaataggggagtgatattgaccttcactctgtcatatctccggtaatatggcgtcaggcttcatcatcagaaagggagcctgacgcctgaaaaagtgaacaacagacagtgttcggattatcaatattcagtttttaacgttgaactggattcattactgcgttgtttaagaatatcccgcgccgaatctgccattatcatgacagcacctgccagcatcagagtatctttcaataccagacgaccagcaccggataaataagggaaaccatgatgagcgtcacccaatgcgggtacccatgcctccggggtggtgattaaaaatgagagtgttaccagcggcgtggtaaatgccatcagcccacccaataaacctaaccagcgattgacaggattagccaaaaccagcagagcaataatcacctccacgacgccaagaccgttggaaaaaccataggtattattagccgtttgccatgctcttgcttctggtttgtattcgccttcgtgagtcagatgctgtttatagtcttccgggtgttcataaaagaacgacattagtggactgtttgcgacgaatggtgtaatgctgtctgcctcgtaagggacaaactttaataacccaatccacataaaaacaatcgcaatactcagacgaatcaatgtcaggccaattttatctccccgacttaacaggtgcaggtatctttccattgtaaacatccttatttatacaatactgctgttgcggttgaattattatcaattcgcatcgatgtaactttccaggatgaagcattatattttctggccatatcagcaatggcattctcaagaactgtcggtgatgctgatactgatgagacgctgatatgtttcagaattattttatcatctgcattggtggaaaatgccataacgccagataatagtgttgcaaataaaacagattttttaaacatataaaataccatcaatgaagtgattaagaagttataaagtaacagggaattaataagattcttttctctgagacgccagaatatttgttctggcgtctgattttgagtttatttgactaatgaaaatagatcattgagtgattcgctcatcgacggatgagtaaatatctgatcgcgtaatatgctataaggcagcccggcatccatcaccattttcactatattgatcatctcgtgggagtcaacacatagcagtgatgcccctaatatacgttgggttttattatcaacaatcgcttttaataccccacgagtatcattcatcactctggcacgcggaattgcagctacaggcaatgtcaccacctgaatatcagcaccactctctctggcctgttcttctgtcataccaaccctggacagtggcggtgtcatgaatacggaataaggcacatttttccgatcatcagtactacgtctgccttctcccagcaattcatcacgcacaatgcggtaatcatccagtgaaatgtaagtaaattgcagcccgccggtaacatctcccatcgcccaaatattgtttgcggtggtatgtaattgcttgtcaacgacaattgccccgcgctcgtttactgcgatacctgcattttctggatgtaacgaagcggtagccggttgacgaccggaagctattaacagtgcatccaccgccagttgggcgtgctcgctatgcacttgcacttgattttcatggtgactgattcgctccacatgggcattgaggattatatcgacaccctgatcgcgtaaaatcgtcgcgatattatcagcaatatcccgatcttcccgaggcaaaaacagcgaagctgcctctaaaatggttactttgctgccaaaattagcgaacatagaggcgaactcaacgccaatatatccgccgcccaaaatacctaaatgcccaggcaattcttttagattaagtaatccggtgctgtcatatacaccaggcgtggtggtaattccaggaattggcggaaccacggcttgtgcaccggtattaataaaaattttctcgccatgaatctccagatttctcccaggccgatgaacacgcaggctatgattattgataaactccgcctggccgtcgatcacgtcgatattgggcatatccgcaagattatgaaaattcttattacgtaaaaaattaaccacttcatttttacgctgtatggcacggacaaaatctgtgtgctgctgtgcgtcatgaaccaatgttttggttgggatacagccgatattaatacaggtcccgccatacattgcatttgattgttcgatgagagccacacgccaacctgcttttgccagcgtgacggctaatgtttttccagccttgccaaaaccaataataactgcctgatatttattcatgatgatttcctgtcgaaacgcgttcatttgacatcatgactatagacgcaaaagagcaaataacatttcttcacaacgcttgatattttgtcttatcgtctggtattttctttttcttaatcagaatcacaaaacaaaaatcatgattaactatttgatggtattagattaattattgactaagattgttggtgtttgtaatcaaaaaaccactcaggagtctgatatggatgctcttagccgtttgttgatgcttaacgctccacaaggaacgatcgataagaattgcgtgttaggaagtgactggcaacttccacatggtgccggggaattgtcggttattcgttggcatgcgttaacgcaaggagcggcgaagctggaaatgccgacgggagagatttttacattacgcccgggaaatgtggtcctgctaccacaaaattcagctcatcgcctgagtcatgtcgataatgaatcgacctgtattgtctgtggcactattcgactgcaacattcggcgcgttattttttaacgtctttgccggaaacgctgtttgtagcaccagtgaaccatagcgtggaatataactggctgagggaggcgatcccgtttttacaacaggaatccagatcggcaatgccgggagtggatgctctgtgtagccagatctgcgctacattctttaccctcgcggtgcgtgagtggattgcacaggttaatacagagaaaaacattctcagtttgcttctgcatccacgtcttggtgcggtaatacagcaaatgctggaaatgccaggacacgcctggaccgtcgaatcgctggccagcatcgcccacatgtcccgggcaagttttgcccagcttttccgtgatgtttccggaaccacgccgctggctgtattaacaaagttgcgtctacaaatagcggcccagatgttttcccgggaaatgctccctgttgtggtgatcgctgagtcagtaggctatgccagcgaatcatcttttcacaaggcgtttgtccgcgagtttggttgtactccgggagaatatcgggaaagggtcagacagcttgcaccctgaataaaaccgccagaaatcagggcaaagataatccgcattccgggagttgtgagcctttcaactatttctatttccaacggtggttttgggttttatatatttttttgatggactctagctcagtttttaaataaaaatgcaaactaaatttcttcaattaaataaaatcccgactattacttgatacgtgattattgtcggtgatttttttgtacaccatcagtgtatatctcaataacccctgaataagtagctctgaataggtataagggatgtagcctttttaaatggatttcttatgccaaaaatgatcgtcgatttccctataaaatgtgagcgatgccgaaagaaataaaattagttattgcatttgaagtttagatgaaagattatcatttgtcatacaaatgaggggtggtatgttgctagccaattaaaaaagaacgccatatttattgatgattgatcccccggaaggggggaaccatcgggcataaatgggcatgaagtaatggagtattagttgtgaatgtcaatttctttgtcacctgtattggtgacgccctgaaatcaagaatggcacgagactccgtgctgctactggaaaaactcggctgtcgcgtaaatttcccggagaaacagggatgctgcggtcagcctgcgatcaatagtggttatatcaaagaagcgattccagggatgaaaaatctgatcgccgcactggaggataacgacgatcccattatttcaccggctggctcttgcacctatgccgtaaaaagttacccgacgtatctggcggatgaacctgaatgggcatcacgtgccgaaaaggttgccgcgcgtatgcaggatctcacctcttttattgttaatacattaggggtagtcgatgtaggtgccagtttgcaagggagagcggtgtatcacccatcttgtagcctggcccgtaagctgggggtgaaggacgaaccacttacgctgctgaaaaatgtgcgtggactggagctgttgacctttgctgaacaggatacctgctgcggatttggcggcacgttctcggtcaaaatggccgaaatatccggcgagatggtgaaagaaaaggttgcgcacctgatggaagtccgccctgagtatttaattggtgctgacgtgagttgcctgctgaacatcagtggacgattacaacgggaagggcagaaagtcaaagtgatgcatattgctgaagtgctgatgagccgctgaggatataaagatgtcgatcaaaaccagtaatacagattttaagacacgcatccgtcagcaaattgaagatccgatcatgcgtaaagcggtggcaaacgcgcagcagcgtattggggcaaatcggcaaaaaatggtcgatgaattggggcactgggaggagtggcgcgatcgggccgcccagatacgtgatcatgttctgagtaatctcgacgcttatctgtaccagctctcagaaaaagtgacacaaaacggcggtcacgtctattttgcaaaaaccaaagaagacgccacccgctacattttacaggttgcccaacgcaaaaatgcccggaaggtagtgaaatctaaatcgatggtgaccgaagagattggtgtcaatcatgtgttgcaggatgccgggattcaggtgattgaaaccgatctgggtgaatacattctccagctggatcaagatccgccctctcatgttgtggtcccggcaattcataaagatcgccatcagatccgtcgagtgctacacgaacgtctgggctatgaggggccggaaacgcctgaagcgatgaccttattcattcggcaaaaaatccgcgaagatttcctcagtgctgaaataggtattaccggctgtaatttcgcggtggcagagaccggttcggtatgcctggtgaccaatgaaggtaatgcgcgaatgtgtaccacgctgcctaaaacgcatattgcagtgatgggaatggagcgtattgctcccacgtttgcagaggtagatgtattgatcaccatgctggcgcgcagtgccgttggtgcacgtttgacgggatacaacacctggctgacaggaccgcgcgaagcggggcacgttgatggtcctgaagagtttcatctggttattgtcgataacgggcgttctgaggtgctggcctctgaatttcgggatgtgctgcgctgtattcgttgcggggcttgtatgaatacttgtccggcatatcgccatattggcggtcatggatatggctctatttatccagggccaattggtgcggtgatttccccgttacttggcggctataaagattttaaagatttaccctacgcctgctctttatgcaccgcttgtgacagcgtgtgtccggtgcgtattccgctgtcaaaactgattttgcgtcatcgtcgggtgatggctgaaaaagggatcaccgcaaaagcagagcaacgggcgataaaaatgttcgcttatgccaatagtcatccaggattgtggaaagttgggatgatggctggtgctcatgcggcaagctggtttatcaatggcggcaaaacaccactcaaatttggcgcgattagcgactggatggaagcacgcgatcttcctgaagctgacggagagagtttccgtagttggtttaagaaacatcaggcgcaggagaaaaagaatggataatcggagcaaatttttgaataacgttgctcaggcactggggcgcccgctgcgacttgaaccgcaagcagaagatgcgccgcttaacaactatgctaacgagcggcttacccaacttacccaacagcagcgctgtgacgcgtttatccagtttgccagcgatgttatgttgacgcgctgtgaactgaccagcgaggcgaaggcggcagaagctgcaatacgtctgtgtaaagagctgggagatcagtcggtcgtgattagtggtgacacgaggctggaggaattggggattagcgaacgtttgcagcaggaatgcaatgccgttgtttgggatccggcgaaaggtattgagaacatatcacaagcagagcaggctaaagtgggcgtcgtatatgctgaatatggtttaaccgaatcgggaggcgtggttcttttttccgccgccgggcgcgggcgttcattgagcctgctcccggaatcttctctttttatcctgcgtaaaagcacaatcctgccgcgtgtagcgcaacttgcagaaaaattgcatcagaaagcgcaggccggcgaacgaatgccgtcatgtattaacatcatcagtggtcccagttcaacggcggacattgagcttatcaaagtcgtcggggttcatggtccggtgaaagcggtgtatctgattattgaggattgctgagagagatatgtagtctggacataaacctgaaggcggtatacgaggttgtgaataacgttaaggacaacctgacttaaccccgttccgtcatggttatgctgcttttctgtaaatatcctgacattaataatgccaggatatttacagttaaaaagacaggaatccattcctgaagacgggctcccttcccggtcactgtcactatagttttatacaggcactctctgtcagaatgctgtttattactgcccagagttttgttggtattcatctaccatttttttgacaaggcaaaacattacagaaatcacaatacttagaaaaaatcccagagccaggcaaatggcagcagggtatttattttttatttctggtgagcttatagtgacacagccatcaccgttcggatacagtgaccagttcctggtcaggtatatcatttttgtataaagctcactgttaattgctgaaggcgtttgtatctcatcgagaacttgcctgccattatggtattctgacgtataccatttaatgatagacgcctgcacgcgagatatttccgcttcagcagttggtaaatctctcttatctcctgaccattccagctttatttctctgttcttgacatctgggctggtctgaaaaaatgtagtaattcgctgaataacatcttcagtcattgtggtctgacaggcaaagttattattgctatcacagctaacaagtatgcctggtgttgtctgatttatttttaggctgtaactcacttttatattatctttattgatatacagaaacaacagcaccattaccatacagatagctataataaaaaggataacacgaatctttttcttcagataaaataaaatctcaatcagatcgatatcctgtttgatttgttcattcataatatatccagaaaatgaaatctgtcgcagataagattgtattaatagtctgtatcaggaatgttcagggtaaatatcagcaaaaagccagcatcatgaatactggatatttatagcctgcaggcagcatactgctgcctgcagggggtataacagtcgacaggggaaccgactgctttattcttaccaggtcacattgataccaactacaccctgtagcgggttctcaatgtcgtcacctttggtgtagtcaaggcttgcatatgctcccatgtttttggtgatatcagcttgtacacctgcacccacgcggaatgctgcaccgtcaatgctggcattgacagactcatcacccagacggactttgttgccatcagagaattcgttcagtgcggccagattcagataaggtttaacggtcgcgttgcccacagcgaagtcataacccacgcgcgtaccggcctcacccagcacagagttatagctgtcagaatgaacgtccacgccgttgagttgataatccacaccttccagagtcagagcagacagtttggcatatggctgaataaacaggccattaccgtctttccatgtgtaaccgcctttaaccatcgcaccaaaaccattggtgttaaagtcagctttgatggtaccgccaccattcatcaggcgaacatctgccgtgttgctgtagtgaccaaactgtgcagcagtatcaatgaagataccgttgttatactggcggctcaggtaagcgtggaagctgtaaccttcagtgtcacctttgctctgcatggtagtcatgtcacctttcgcagaagacatcgccacaccggccagccagctaccatcttcagtcatgaagcgggtatcaccacccagcattacaccatttacatccaggtcataggatgcatttcccgcggtggtatgtttctgtttaccgccaaagtactgaatccatacgccacccttgtcattttcgctcagacggacagcatcctgacgggcggagagcgtgtcagcctgcagattagcgacgttagccggagcagctgccattgcctgaatcacggagctggcgttggatgctttatgcgtgttttttacgaaataaaagttaccatcagctccctgtgtcaggtcatattgatacagaccaccttccgttgtgcctgtggcttttagagtgctgtctttgccggtagaaataaatgccgtttgttcattgataagatccaatgaacccgcactgtaaacacgcaagtcaccgctcgctttaccgctgatatccagagtgttttcagaagaggcatcaacaatcagagtgccgttttgagaagcaaacgtgccagtattgactgtagccttcgtgatattaaccgtactgtcttttactgccagagcatcaacagttgaggaacccgtaacattccagacagacccgttttgcagagatacactggcatctcctgcccctgaaactttgcctttccagactgaactatcggaaagatttatatccagatcactacccgctttatcgccgctattgaaggtataagcattaccttcccagtaagagcgggcaacgttcatatttacatttgttgtggtactggctgaattctcgctttcagaaagggccaggacatcagagtagatggttgaatcagcaacagacaaatttaaattttgcgttgctgaacctgcgccttgtgccgaagcagaggcataaattgtttgtttattattagccgccccaattactgagccatccttaatattcaggttgactgtatgaattcccgtcttattcccggcagtaactattgtttcaatcccgccattaataatatttgagtcagcaagggtgatgttgtcggttgcatcaccgtcaaaaccctgcaacaaattacccttttgagcaaaaattgccgtagagccgttgctgtaactcttattaccttgagcatttatggttgtaccattgagcgttaaattatttcccgtggtcgcttccagagatatccctgtcgcactacctttttcattttttgcaacgaaattaccgccattaacaacaacatcgccagttgaatcaatgaccattgcagtccggacataggtgccttcaccttgagctgtgatggtggagtctgtagcattaatcacaacatttttgttaccactaacttttacaccttcaacgaaatcttggtttaccgttgatgcggcggtaatatcgtgaccgccaaaagtaacattaaggtctttatctgaatctgacgtttcaattgttacggctgtaatcttgttatcaccgttaataacaacatcttgatccagagtcgtcttctctgtattcagcgtaaccggatcagttgataccgtgctatcagtagcgaatgctggtgcagaaagagccataacaatagctgtcgctaatgcgctgcggtaaaataccttactgtttttcatgaagaaattctccattctggtaactaatttcaatttcccacttatttatatttatgcagagataaagcctgcgtccctgcatttaccaccacggaatacctgttggtatttccgttttcacgcaatgtcatggcattcgttgtttccaatgcatttccatcaccgtgaaaattattgctgctcagcagcagggcttcccgcaatgacatgctgtccggtattccccaacgcttttttagcgactgctcggcaagccatatctgtcttatccccgttttgagaaactgcgcactgtattcccagctgtgtccggcaagaagtaacgacaacaccttcttttgcttttccgggaagcgttctgacatgacgattgtctttgtgcagttattcacctctttcataaagacagagtaactgtccataactggcaaaatttctgcatgcttcagccctgaaaacccaccagaggcatttgcaatactgatgacacgctctactgacattcctggtttcagtaacctcaggtttttgagaacgccagaaatactcacatccggtggcagaaaaaagggcgcgacgcacaacaccaccacgaatgagtgatcccgataaaatcggaaccacatttcagcgcattcggcaggtcgccctgccgatatcacgacactctgtggcctgtgccgcaatttattgcgtaactcctcttctgttctgatgcaggtaacattgccgacagaaccggttgatagagctgcgaactgcgctggtacaattcctgagggacagaaaagaacgaaacgcatccttccctcacagatgtcagtacgccagcacgctgtacaggctgtacagcgtgcctcccaatcctgcagcccagaacagtagaaatattttggctcctacactgtagcgagtccgtatgcgccgcagtgggtggtagtaacaacgctgctgtgtcataacaatcctggtctttttttagatatattttttctttgtccggaaagtacttttccggaaatggcgtcagaatttattgattcaccaacggcaactttctctggataaaggattccggataccatgttctgcacatactgagtgagtcgatgagcggaatgttgtccgatatattttgcatgtagccgtatattccgtttcactctgctgtcaccgcatcccgtatagagcagcctgaaatcgctcagtgttcccagtccaagtttcattaaagcccgtgtggcaatcgcatgcagggtctttgaactgcgttgttcataacgggcaatctcactgaaactcataccctgcatcagaatcttaagcacgctcaactcccgtgcagtcaggagccagaaatcgctcatatcgccgggcaaaggacgcagtaaccagcggataatttgattctgataacgactcgctgtcagcatggtgccgatgcgtgggaagccgttatacagacttgcagcaggagcattatcgaaccagtcggagtcaccggtcaggcagacctgccattgcccggcatcactccgcaaacgggcgagacaagccagaagaaccaactcccctgaaggaagcgaagggatatcagctaacaggtagccacaggaggtctttaaaacgaattcaacctctgtagtgacgttgctgtacacccgcacgatatacctgtccgttgggatgagagactccagtgccaacctggtgaactgacaggcactgataataaccagaggcttcttcattcagactcgtccacgccattgctacaaaacctgacattttgattcaaaatgtcaggtttggtttaatagcctgaatatttaattttcttggaatataaatctaatttgtttggtttttattgtttttaattttgtgttatttaacaatatgggcgaaagttaatcactggtatgacctttgtgattaatcattttaaatcatggggttattttaatttagctagaaatatcaacatgttatgtgttttatttaattgaatgggctgtttttttatggaagaattgaggaaaacgtaggaatctgacattttgaatcagaaggtactgttttaacgaggcttttttttccacacccctttaaaacgagcagcattactggctgtgtatctgacagtatgctgaatatttcgatgacccagataatcctgaagtagtcgggtatcgacaccattgtcagccagagcaaaaccacaggcatgacgtaacatatgaggatgtgcttttacagctaatcctgcacgttttccagcctcacgaatgatagaaaaaaaatgttgtctgctgatagggcggcgtttccgggagagaaaaagccagtctccttcaactccgttttcaattaacttcctctgcttaagccacaacttgatcaaattatattcatcaggaagaagaggatgtgttgtcgagaaaccatttttaatacgccgaatattaagttgttttccagatgcatcaatatcggataaacgtaaatcaagaagttcactggccctaaaaccgtgaatgaaagccatcataatcagacagcgatttctttcaggaaaggacatgctctgggctgcatccatcagcctgtagacttcatcctgtgtgagatattttctcgtcatacgccaccgtgtacagttgtaaaaaaaagagaggcacacccagataagtatgcctgcaatcagaacgttatcgatgtaatctcattatctcattaataagattttttgaatagtagttctacgcaacagattaaatatgaactatttattgtgcagcttttctacaagtcatttttaatgcgtgtttttatctactataatgtgaaaaaataaatattaaaactatgagtgacaggtcgtgtgggatgtgtattacgtctaacgttttagtaattttttattagttatgagatatttaacatcatttcctgtgagattgtcttgttgtgtatccaattgattttacttttgttttttttgatgcataaatttggaggatagaaagtaagattagcttaatatcaatgatatgaatttgtaaatacatattgttgcaaggtgttctttacttttttggtcgtgagtaaatcattgttaatgggttctactcataaattaaaaatattcatttaaatgatttttactttttgtatatctcaatttgtttattttgcattcatttgatggagagtattccaacactttttatttttcgcaaaaaacttattaacaactttttattatcaattgaaaattaatgtaaactaaaatgttagcgaagcgataatcttgtgctaaaaaatatttaagcatgatgattaattaaagaagagtaaaaataaatcactgctaataaattatacgaatcgtgtttaaagctccatgtggttttggtctgacttatttttgtactcgttacaagaacccttttcgtatatgctaaccgtgagcgggaatgaacaggtaaccatagccaggaacattagcggcgtaattcttaagctgagtggtatttcatctgtagtttatctgtgtatgcatagcaccttcatcagccagattgagcaagtcagcttagaatttgctggcgagattgtcacgatgaagcatgagagttacctcagtgttttatataaggattcggtcctcatagtagaacggtaactctcaatctgatcggttcctgagtcagttcacatcacgactcattttttcgctctcaccggcatcccatttgccacaaaatatcccgccgtgctcctcggcaacgcttccttcccacgaatcatatccgctattttctcgccaatcataatcgtcgtggcgttcaaattgccggtgataatttgcggcataattgacgcatccaccacgcgcaggccttccagcccgtgtacgcggccttcgccgtcaaccacagccatctcgtcataacccattttgcaggtaccgcacggatgaaacgcggtttcggcgtggttacgcacgaactcatcgagctgctcatccgtctggcattcgacaccagggctgatttcgcggccacggtattgatccagcgcgggttgatgcatgatctcgcgggtgatgcgaattgcgtcgcggaactcctgccagtcctgctcgtgcgacatgtagttaaacagaattcccggatgctggtgcgggtcgcgggatttaatccgcacatgcccacggcttggcgagcgcatcgatccgacatggcattggaagccgtgctctttcactgcgttcgagccgttatagttaatcgccactggcaggaaatggtactgaatattcggccacgcaaattcctcacggctgcgaataaatccgcctgcttcaaagtggttgctggcaccaacgccggtgccgccaaacagccactccgcaccgattctcggctgattccaccactgcagagcagggtagagggaaaccggttctttgcactcgtattgcagatacatctccaggtgatcctgaagattttcgccgacgccgggtaattcatgcaccagcggaatatcaaactccgccagcagttcagcgttgccgacgccggagcgttgcaggatctgcggtgaagcaatcgcgcctgcacataacagcacttctttattcgccgccgcgcgggtcggaatggtgctgtcgccttccagccactcgacgcccaccgcgcgtttgccgtcaaaaatgatgtgatcggtcatggcgtgagtacgaatggtcaggttagggcgcgatttggcctgatcgagatagccacgcgcggtgctggcgcgacggccatgcggcgtgacggtgcgatccatcgggccaaaaccttcctgctgatagccgttgagatcgtccgtgcgcgggtagcctgcctgcatgcccgcttcaatcatcgcttcaaacagcggattgacgccgggtttggaggtggtgacgctcaccgggccatcgccaccgtggtaatcgttctcgcccacatcgcgagtctcggccttgcggtagtagggcaggcagtcgagataactccagttctccagactaggttcttgtgcccagttatcgagatccagcgcattgccacggatgtagcacataccgttgatcagcgatgaaccgcccagacctttgccgcgtccgcactccatgcggcggttgttcataaacggttcgggttccgtctcataggcccagttatagcgtttgccctgtagcgggaacgccagcgcggcgggcatctgggtgcggaagtcaaagcgatagtccgggccgcctgcttcaagcagcagcacggttgtgttcggatcttcagtcagacgggtagcgagaacgttgccggctgagccggcaccaataatgatgtagtcaaattgcaaataaacctcctggttagaatatggactggaatttagccatctcaacctggatggacttcacctgggtgtaactctggagcgtcatcacgccgttctcgcgaccaatgccggagtgtttgtagccgccaacgggtatctctgccggggattcgccccaggtgttgatccagcaaatacccgcttccagctgatgaatgacgcgatgcgcgcggttcaggtccgccgtcacgatacccgccgccagaccgtagtcggtatcgttagcgcggcgaatgacttcgtcttccgactcgtaggtcagaatggacatcaccggcccgaaaatctcttcgcgcacaatggtcatatcgtcgctgcaatcggtgaacacggtcggtgcaacccatgcgccgttatcgaagctatcccccttcagtacattgccgccgcacagtacgcgcgcgccttcctctttgcctttggcgatatagcgcagcacgttatcgcgatgcgggaagctgaccagcgggccgaagttagtttgcggatcgaaaacgtcgcccgcgcgaatgcgctcaacgcgcgccagaaccttttgttcaaatgcggctttgcatttcgtcggaacgaagacgcgagtgccgttggtacacacctgaccggagctgaagaaattcgccatcatggcgatatcggcggcgagatcgagatccgcatcgtcgaaaacgatcagcggtgatttaccgcccagctccatggtcacttctttcagggaggaagctgccgagttagccatcacttttttgccgctggcgacgccgccggtaaatgacactttggcaatgcccggatgatcggtcagatattgcccggtctccgcgcccacgcccggcaacacgttaaatacaccgtccggcaggcccgcttcgctgtaaatttcagccagctttaacgcggtaagcggggtgacttcgctcggtttgaagatcatcgcgttacccgccgccagcgcgggggcggatttccacaaagcaatctggatcgggtagttccatgcgccaatccccgccactacgcccagcggttcgcggcgggtataaacaaatgacgtctcacgcaacgggatctggctgccttccagcgccgggatcagcccggcatagtactccagcacgtccgcaccggtaacgatatcgacggttgaggtttccgaatatgcttttccggtgtcgagggtttccagttttgcgagttcgtcattgcgttcacgcagaatatcaacggcccgacgcagaatacgcgagcgttccatagcggtcatcgccgcccagattttttgcccttgttgggcactcttcacggcgcgatcgacatcctcacgcccggcggcctgcacggtcgccagcacgttaccgttggccgggttaatggtctcgaaggtgcgaccgctggtggcggaggtataaccaccatgtatataaagctgctgttctgccattcgggacatcacgtctcctcggttaatcggtgggtaaatgctgagtaataaagtgacgggtcagcgagtgtgcgagaggtttatccagcggtttgccgctcagtgccgcgcgcagccataatccgtcaattagcgcggcaaggccgtagcccgcttcctgtgcctgttggcgcggtaactcgcggcgaaattcgctcaccagattcgacaataagcggcggctactgacctgctgcaagcgatagagcatcggctgatgcatactgctggcccagaaggccagccaggctttcatcgccgcactgctcacctgggtttcatcgaagtttccgccaacaatcgcctgtaatcgccgctctgcactgccctgcggaagtgcatgtaatcgattcaaaaccgcgtcacgcagctgactggtgatatcgcgcatggttgcttccagcagaccatttttgtccctgaaatagtggctgatgatccccgtagaaacgcctgcacggcgggcgatctgcgcgatcgttgcatcgtgcatgcccacttcatttattgcttccagcgtggcgtcgatcagttgtctgcgccggatcgactgcattcccaatttgggcattttcgccactccattcatcagcgttgtttatctattaaagcggttattgattggacgttcaatataaaatgtgtcttaattgttactaatttgattttaaatggtaacagtaacagtggggatactggatgacagacctttcacacagcagggaaaaggacaaaatcaatccggtggtgttttacacttccgccggactgattttgttgttttccctgacaacgatcctgtttcgcgacttctcggccctgtggattggccgcacgctggactgggtttctaaaaccttcggttggtactatctgctggcggcaacgctctatattgtctttgtggtctgtatcgcttgttcgcgttttggttcggtgaagctcgggccagaacaatcaaaaccggaattcagtctgctgagttgggcggcgatgctgtttgctgccgggatcggtatcgacctgatgttcttctccgtagccgaaccggtaacgcagtatatgcagccgccggaaggcgcgggacagacgattgaggccgcgcgtcaggcgatggtctggacgctgtttcactacggcttaaccggctggtcgatgtatgcgctgatgggcatggcgctcggatactttagctatcgttataatttgccgctcactatccgctcggcgctgtacccgatcttcggtaaacggattaacgggccgataggtcactcagtggatattgctgcggtgatcggcaccatcttcggtattgccactacgctcggtatcggtgtggtgcagcttaactatggcttgagcgtgctgtttgatattcccgattcgatggcggcgaaagcggcactgatcgccttgtcggtgatcatcgccactatctcggtgacatccggtgttgataagggcattcgcgtgttatcggaactcaacgttgcgctggcgctgggattgattctgttcgtgttgtttatgggcgacacctcgttcctgcttaatgcactggtgctgaatgttggcgactatgtgaatcgctttatgggcatgacgctcaacagttttgccttcgaccgtccggttgagtggatgaataactggacgctcttcttctgggcatggtgggtggcatggtcgccgtttgtcggcttgttcctggcgcgtatctcgcgtgggcgtaccattcgccagttcgtgctgggcacgttgattattccgtttaccttcacgctgttatggctctcggtattcggcaatagcgcgctgtatgaaatcatccacggcggcgcggcatttgccgaggaagcgatggtccatccggagcgcggcttctacagcctgctggcgcagtatccggcgtttacctttagcgcctccgtcgccaccattactggcctgctattttatgtgacctcggcggactccggtgcgctggtgctggggaatttcacctcgcagcttaaagatatcaacagcgacgcccccggctggctgcgcgtcttctggtcggtggcgattggcctgctgacgctaggcatgctgatgaccaacgggatatccgcgctgcaaaacaccacggtgattatgggcctgccgttcagctttgtgatcttcttcgtgatggcggggttgtataaatctctgaaggtagaagattaccgccgtgaaagtgccaaccgcgataccgcaccgcgaccgctgggtcttcaggatcgcctgagctggaaaaaacgtctctcgcgcctgatgaattatccgggcacgcgttacactaaacagatgatggagacggtctgttatccggcaatggaagaagtggcgcaggaactgcggttgcgcggcgcgtacgtggagctaaaaaacctgccgccggaagagggacaacagttggggcatctggatttgttggtgcatatgggcgaagagcagaactttgtctatcagatttggccgcagcaatattcagtgccgggctttacctaccgcgcacgtagcgggaaatcgacctactaccggctggaaaccttcctgttagaaggcagccagggcaacgacctgatggactacagcaaagagcaggtgatcaccgatattctcgaccagtacgagcggcaccttaactttatccatctccatcgtgaagcgccgggccatagcgtgatgttcccggacgcgtgattgttattgcataaaaccgcgccatgtctgcatatggcgcggtttctcttacctcttgatacgttatatctgtacagttaagcccttagtatcgattgatgattgccaggcaacagataataaaaaagaaaagaactattgaagcccaaaaactacgtttggactgttgtgaatgttcaataagcttagtcttatttaatgtaaatattggtgctaatttgaaatgacgctttattcatggggaacgcgtagcgcaaatcaactaaaatcaatgtaaccgtttgttgtttaaggtttaattgtctgtgtctgatattttattgattgttttaaatattgtttttattgtcattgttataatgttggctatctattgctgaatggattcagtcttaaaaagcaggttgttaagggataggcatggagtaatgacgtgtatgcataaccaacatctttactcattatgtcattgaatgttgacgctatgtgtttatgaggttgaggtattttcagttgatctggattgttaaattcatataatgcgcctttactcatgaatgggcgtcaatacgtagtgggaaattataaatatcgaaatagtccaactacttctttattaccaaaaatgagtatctgaattttaatattgcattcttgcgtgattatctcctgagtttgacttgtgattacctttttaaggtatttagcgtaactgtttttgagcgagcatcagaggtaaagataatcttcttgatagtgatgtgggatgttatacgtatggcatcgctaatgtttatggttaccccttatgtgtgctcaggaatccacaggtaatcactcatactgaacagcgataaaagataaaaggtgtgttcatgaattcatgtgattttcgtgtttttctgcaagagttcggtacaacggttcatttgtcattgcctggtagcgtatccgagaaagaacgactgctactcaagctgctgatgcagggaatgtctgtaacagaaatatcacagtacagaaatcgcagtgcaaagaccatttcacatcaaaagaaacagctctttgagaaactggggattcagagcgatattactttctggcgggatattttctttcagtacaatccggagatcatatccgccacgggtaataatagtcacaaatatattaatgataatcactatcaccatatcgtcacgcctgaagccatcagtctggcgttggaaaaccacgagtttaaaccgtggatccaaccggttttctgcgcgcagactggggtactgacgggctgtgaagtgcttgtccgctgggaacatccacaaacgggaatgatcccaccggatcagtttattcctctggcggagtcatccggtcttattgtcataatgactcgccagctgatgaaacagactgcggatattctgatgccggtaaaacatttgctgccggacaatttccatattggtatcaacgtctcggcgggctgttttttggctgcgggatttgaaaaagagtgtctgaacctggttaagaaattaggtaacgataaaatcaagctggttcttgagctgacggaacgtaatcctattccggtaacgccagaagccagagcgatatttgacagccttcatcagcacaatattacttttgcgctggatgactttggtacgggttatgcgacctatcgttacttgcaggcgttcccggtcgattttattaaaattgacaagtcgtttgtgcaaatggcgagtgtcgatgaaatctccggtcatattgtggacaatattgtcgaactggcgcgtaagcctggtctgagtatcgtggcggaaggggtagaaacccaggagcaggcggatttaatgatcggtaaaggcgttcactttttacagggctatttgtactctccgccagtaccgggtaataaatttatctctgaatgggtaatgaaagcaggtggttgatgtaaaccgctattcacagcgcatcgggaggttggcagcgattaattctcccgatgcagtaaatcctgatagatccccgttaatatgccatttggcgcaaattgttttttaatccactgcgtcacctgaccggtggcagagtgctgggttgcgagtaacatgcgtgaatcctggcgcgggttatggatttgtcgggtaaccagcaaggattgcgccatcgcctcacggaccatgtaatccggcaaaaaaccaattccttcacctaaaatctggcactgacatttggtgttgaaatctggcaccagaattgactcctgcccatgcagcaaccagcccacttttttattaatcgtatgcgcggtgtcctccaccatgatattagggtagagacgcagctggctttcggcgatcggctccggcacaaaggctaatgggtgatccggggcgatggcaaaagcccagcgaatcgcgccaatctccgtgtaatcaatgccgccaccgtccagcagcgtgtcgggggcgccgatagcgatatttgcctgattattaataatcgcatcccagacgccgttatacacttcggtggtgacggtaatctggcaggtaggaaactgctttttcagcacctgtaataagcgtgcggtgtgtttgggcgtataaagcagctgattaatacaaatgcgcacacgcgcttctatgccctgcgaaatagtatcgatactgcgtttaatggcatgaaaatcattcagcaggtcggtagctttgcggaaaaaataacgcccggactccgttaactcaatgctgcgggtactgcgagtgaacagcaccacatccagccccgtctccatacgtttaatggtgtagctaatggcggaagtggttaaacccaactcttctgcggctttactgaagctgccaaaacgcgcagcggtagtaaatgccaacagattctcttcggtaaaaattgagttcattgacccgctcccgccattttcgattctgaatttctccagccatgactgtagaggtatccattaaagatggataatcatttttgaataacttttaatacccgtcgcttttggtcgtcgcttcgcttaatttttgtccgccgtattctgaaattatccccacgcagttacccgccagaaaacccagtaatgtcaccgtccagttcatcccgctggcaaaaaatagcgtcatgccgagaaagcctccgggaataaaagacagtaaccagaaacgcccttgccagaccaccaccgccgagaagggtacagtcgtaatcacgctcgcccagaacgcggacagtccactcaccggggccagccaaccggcagccagcgcggcgaaaaacgcccacaccatcccggaataattaaccgccaggcttttgataaaccccgatttaccgccgcctgcggcataaaaactgcaaaaggcgacgaagccaatggttcctaataattcccatccctgagagagcccgacatgtgaagacactaactgccaaagccctgcacaaataccgacggtgacacccgttgccgtgagtccgttcatcttgttcccctctggttagacatggacgaaagctactcttacatgtgcagactatagagaaataaaacctgattgagtgaaagggtatcgggtcaaagaaacaaatattgcactaccgcacacggcgaaaagattgttgaacatcattcaacaaaaaggcgaaatacggcgaattaaatttaagcgggttcttttatcagattatcgttgctattctcaattcatcgaaaacagccacaaaaaccaggggaatgtgaatgactataaaaaatctacctgccgactatttattggctgcacaacagggcgatatcgataaagtaaaaaactgccttgcgctgggtgtcgatattaatacctgcgatcgccacgggaaaacggcaattacgctggcaagtttatatcagcaatatgcttgcgttcaggcattaattgacgccggagcggatattaataaacaagatcatacctgtttaaatccttttttaattagctgtctgaacgatgatttaacgctactacgaattattttaccggctaaacccgatcttaattgcgtaacccgttttggcggtgtcggcctgacgcctgcctgtgaaaaaggccatttaagtattgtaaaagagcttttggcaaatacggagattaacgttaaccagactaaccatgttggctggacaccgttgctggaagcgattgtgcttaacgatggcgggattaaacagcaggcgattgtccagttattgctggaacacggtgccagcccgcatctgaccgataaatatggcaaaacgccgctggaactggcgcgggaacggggctttgaagagattgcgcagttgctgatcgccgcaggtgcataaaccgggaggcttgttatcaacacaccagaaaaacggtgtgtgtgggcgctaactgcggatgctgattttctggcgcagcgggggcaaggacaggttgaacaggtctttgccagagcggtaaatatcgtactcccggctcgccagcagttgctgacgctgctttgtgaagagtacgacaatgcgcctaacagttgtcggttggcactcactcactttaatggtctgttccggcatggtgataaggttcagtttgacgatcaaggcattacgattggtcaacatcatcatatagagatgagtcattgccagcgttggctgtccccaaccatgcaaatgaccgctctgaattttcaccttatcgcctggcaacagtggcacgacattattcatcagcacctgggggaaaatgaaaccctgtttaattatcgcggcgataatccgttttatcaggcgttaaataaagaactacatattaaacgtcgggcagttattcaggccgtaaacgataaacaaaatatcgccgtagcggtcgccagtatgatgggcttagggattggccttacgccatcagccgatgattatctgaccggactggtacttattttatttatttccggacatccggcggaaaaatacaaagaggaattttatctcggtttgcaacgcggcagaaataataccacgttattaagtgccatcacgctggaagccgcattacaacaacgctgccgggaaaatattcatcgttttattcacaacattatttatgacatccctgggaacgcaactcaggcaatagaaaaaattaaacatattggctccagttccggctgcgacatgctgtatggcatggccgatggttgtgcgctgagccaaacttacggagggaattatgtcagttaaaatagtcattaaaccgaatacctattttgattctgtctcgctgatgtctatctccacgcgtgcaaataaactcgacggcgtcgagcaggcatttgtggcgatggcgaccgaaatgaacaaaggcgtgttgaagaatttaggactgctgacgccggagctggagcaggcgaaaaacggcgacctgatgattgtcatcaatggtaaatcgggtgtggacaacgagcagttgctggcggagattgaagaactgttcaacaccaaagcgcaaagcggctcgcacgaggcgcgttacgccactattgccagcgccaaaaagtatatcccggaaagtaacctggcagtgatttcggtcaacggtctgtttgccgctcgcgaagcgcgtcaggcgctgcaaaatgacctcaacgtgatgctgttttccgataatgtctcagttgaagatgaactggcgctcaaacagttggcccatgaaaaagggctgctgatgatggggccagactgcggcacggcgattatcaacggcgcggcgctctgctttggtaacgccgtgcgtcgcggcaacatcggtattgttggcgcatctggcaccggcagccaggaattgagcgtccgtatctatgaatttggtggcggcgtttcacaactgatcggcaccggcgggcgcgacctgagcgagaaaatcggtggcctgatgatgctcgatgccatcgggatgctggaaaacgatccgcaaactgaaatcattgtgcttatctccaaaccgcctgcgcctgcggtggcccgcaaagtgctggaacgcgcacgcgcctgccgcaagccagtggtggcctgcttcctcggtcgtggcgaaacgccagtggatgagcaggggctacagtttgctcgcggcagcaaagaggcggcattgaaagcggtgatgctctccggcgtgaaacaagaacatctcgacctgcatacgcttaaccagccgttgattgcggatgtgcgtgcgcgtctgcaaccgcagcagaaatacattcgtggtctgttctgcggcggtacgctgtgtgacgaaaccctgttcgcggtgatggaaaaacatggcgatgtctacagcaatatccagcccgatcctgaattccgcctgcaagatatcaaccgcagcatcaaacacaccttcctcgattttggcgatgatgacttcaccaacggcaagccgcatccaatgattgacccgaccaaccgtatcagccgcttgatcgaagaagcgcgcgatccagaagtggcggtgatcgtgatggattttgtgctcggatttggatcgcatgaagatccggtcggttccaccatcgaggcgatcaaagaagcgaaagcgatcgccgctgccgaaggacgcgagttgatcattctcgcctatgtgctgggcaccgatctcgatacgccatcattagaacaacaaagccagatgctgcttgatgccggagtgattctggcgagcagcagcaccaataccggattgctggcgcgtgaatttatctgcaaaggggaggaagcctgatgagccagtcactgtttagccaaccgttgaacgttattaacgtcggtatcgccatgtttagcgatgatctgaaaaagcagcatgtagaagtgacccaactcgactggacgccgccggggcagggcaatatgcaggtggtgcaggcgctggataacattgccgattcgccgctggcagacaaaatcgccgccgcgaatcagcaggcgctggagcgcattatccagtcgcatccggtgctgattggttttgatcaggcgattaacgtggtgccgggcatgacggcgaaaaccattcttcacgccgggccgccggtcacctgggaaaaaatgtgcggcgcgatgaaaggcgcggtcaccggagcgctggtgtttgaaggactggcgaaagatctcgacgaggcggctgagctggcggcttccggggagatcaccttctcgccgtgccacgaacacgactgtgtgggatcgatggcgggcgtcacctcggcctcgatgtttatgcacatcgtgaaaaacaaaacctatggcaacatcgcttataccaacatgagcgagcagatggcgaagattttgcgtatgggcgctaacgaccagagcgtgatcgaccgcctcaactggatgcgcgatgtgcagggacccatgctgcgcgacgcgatgaaaattatcggcgaaatcgatctgcgcttaatgctggcgcaggcgctgcatatgggcgatgaatgccataaccgcaataacgccgggacgacgctgctgattcaggcgctgacgccggggattattcaggcaggttattccgtcgagcaacagcgcgaagtgtttgagtttgtcgccagcagcgactacttctccggcccgacgtggatggcgatgtgtaaagcggcgatggatgcggcgcacggcatcgaatacagcaccgtggtgaccactatggcgcgtaacggcgtcgagttcggcctgcgggtcagcggcctgccggggcagtggtttaccggcccggcgcagcaggtcatcggcccgatgtttgccggttataagccggaagattcggggctggatatcggcgacagcgccatcaccgaaacctacggtattggcggatttgcgatggcgaccgcgcccgcgatcgtcgcgctggtgggcggcacggtggaagaggctatcgatttctcccgtcagatgcgtgaaatcacccttggcgaaaaccccaacgtcaccattccgctgctcggttttatgggcgtgccgtcggcaatcgacatcacccgcgtgggtagcagcggcattctgccggtgatcaacaccgctattgcccataaagatgcgggcgtcggcatgattggcgcgggcattgtgcatccacccttcgcctgctttcgagaaagccattctttggctggtgcgaacgttacggcgtctgagttacatgtttatgccggatgcgacatgaatgtcttatccggcctacgaatggcgcggaaatctgtaggcctgataagcgtggcgcttcaggcattggccaccacagccggatgcggcgtgaacgccttatccggcctacgaatggcgcggaaatctgtaggcccggccttgataagcgtggcgcttcaggcattggccaccacagccggatgcggcgtgaacgccttatccggcctacgaatggcacgggaatctgtaggcctgataagcgtagcgcatcaggcagtctggcgttggtcataagtttaccggcccggcgcagcaggtcatcggcccgatgtttgccggttataagccggaagattcggggctggatatcggcgacagcgccatcaccgaaacctacggtattggcggatttgcgatggcgaccgcgcccgcgatcgtcgcgctggtgggcggcacggtggaagaggctatcgatttctcccgtcagatgcgtgaaatcacccttggcgaaaaccccaacgtcaccattccgctgctcggttttatgggcgtgccgtcggcaatcgacatcacccgcgtgggtagcagcggcattctgccggtgatcaacaccgctattgcccataaagatgcgggcgtcggcatgattggcgcgggcattgtgcatccacccttcgcctgcttcgagaaagccattcttggctggtgcgaacgttacggcgtctgagttacatgtttatgccggatgcgacatgaatgtcttatccggcctacgaatggcgcggaaatctgtaggcctgataagcgtggcgcttcaggcattggccaccacagccggatgcggcgtgaacgccttatccggcctacgaatggcgcggaaatctgtaggcctgataagcgtggcgcttcaggcattggccaccacagccggatgcggcgtgaacgccttatccggcctacgaatggcacgggaatctgtaggcctgataagcgtagcgcatcaggcagtctggcgttggtcataaccccatcaccctctgtcgcggacataacaacatgaaagaacttgtggtcgttgccattggtggcaacagcattatcaaagataacgccagccagtcgattgagcatcaggcggaggcggtgaaagccgtggccgatacggtgctggaaatgctggcttccgattacgacattgtgctgacccacggcaacgggccgcaggtcgggctggatttacgccgcgcggagattgcccacgagcgcgaagggctgcccttaacgccgctggcgaactgtgtggcggatacgcaaggtggcattggctatctgatccagcaggcgctgaacaaccgactggcgcgtcacggcgagaaaaaagccgtcaccgtggtgactcaggtagaagtggataaaaacgatccggggtttgcccatcccatcaaacccattggcgcattctttagtgaaagccagcgtgacgaactacaaaaggcaaaccctgactggcgttttgttgaagatgccggacggggctatcgccgcgtggtcgcctcgccggaaccgaaacgtattgtcgaagcacctgccattaaggcgctgatccaacaaggctttgtggtgattggcgcgggcggcggcggaattccggtagtgcgtactgacgcgggggattaccaaagcgtggacgcggttatcgacaaagatctctctaccgcgctactggctcgcgaaattcacgccgacattctggtgatcaccactggcgtcgaaaaagtgtgtattcactttggcaaaccgcagcagcaggcgctggatcgcgtagatattgccaccatgacccgctatatgcaggaagggcatttcccacctggcagcatgttgccaaaaatcatcgccagcctgacgttcctggaacagggcggcaaagaagtgattatcaccacgccggaatgcctgcctgcggcgctacgcggcgaaacgggcacccatattattaaaacctaaggacgtaagatgaaagaaaacaatagccgccgtgaatttctgagccagagcggtaagatggtcaccgccgccgcgctgtttggtccctcattgccgctcgcccatgcgggggtagctggcaccctaaactgcgaagcgaacaacaccatgaaaatcactgacccgtattactatctcgataacgtgctgctggaaaccggttttgactacgaaaatggcgtggcggtacagacccgcacggcgcgccagaccgtggagattcaggacggtaaaattgttgccctgcgcgagaacaagcagcatccggacgccacgctgccgcactatgacgctggcggtaagctgatgctgcccaccacccgcgacatgcatattcatctcgacaaaaccttctacggcgggccgtggcgctcgctcaatcgtccggcaggcaccactatccaggacatgatcaaactcgagcagaaaatgctgccggaactgcaaccgtacacgcaggaacgggcggaaaaactgatcgatttattgcaatcgaaaggcaccaccattgcccgcagccactgcaatatcgaaccggtttccggcctgaaaaatctgcaaaatttgcaggcggtgctggcgcgacgtcaggcgggcttcgagtgtgaaatcgtcgccttcccgcagcacggtttgctgctgtcgaaatcggaacccttaatgcgcgaagcgatgcaggcgggggcgcattacgtcggcgggctggacccgaccagtgttgatggcgcgatggaaaaatccctcgacaccatgttccagattgcgctggactatgacaaaggcgtcgatattcacctgcacgaaaccacgccggcaggcgtggcagccatcaattatatggttgaaacggtagagaaaacgccgcagctaaaaggcaagctgaccatcagccacgcctttgcgctggcaacgctcaacgaacaacaggtagataaactggcgcaccggatggtggcgcagcaaatttctatcgcctcgacggtgccgattggcacgttgcatatgccgctcaaacagttgcacgacaaaggcgtaaaagtcatgaccggcaccgacagcgttatcgaccactggtcgccttacggcctgggcgacatgctggaaaaagccaatctgtacgcgcagctctatattcgtcctaacgaacagaacctctcccgctcgctgtttttagccactggcgatatattgccgctgaatgaaaaaggcgagcgtgtgtggcctaaagcgcaggatgacgccagttttgtgctggtggacgcctcctgttccgccgaggcggtggcgcgtatttcgccgagaacggcgacgttccataaagggcaactggtgtggggaagtgtggcaggttgatatgcatttaatatgtctgcaacggtgaacagtaagagatttaagccccagggagtggggcggcctgagtatgagtgtgttggcagaaatggacattatctttgaagaatatgcccttattgacgttgtgtagataactatttgtctacgtgaaaatatcatcagttttgccgatttttgtcttttacggatagcaaatatcacacttataggcgctcgccttatggggaacgttgctgctctgtttcattcaggctcgcggcatgttggggctggatcgggtggtttaaatattggctatattcaatggacgcgttttgccgcgatgacatatcaggcatcgccaaatacacatagctaatcaggagtaaacacaatgaagatcaaagctgttggtgcatattccgctaaacaaccacttgaatcgatggatatcacccggcgtgaaccgggaccgcatgatgtcaaaattgaaatcgcttactgtggcgtctgccattccgatatccaccaggtccgttccgagtgggcggggacggtttacccctgcgtgccgggtcatgaaattgtggggcgcgtggtagccgttggtgatcaggtagaaaaacatgcgccgggcgatctggttggtgtcggttgcattgtcgacagttgtaaacattgcgaagagtgtgaagatgggctggaaaactactgtgatcacatgaccggaacctataactcgccgacaccggatgaaccgggccatactctgggcggctactcacaacagatcgtcgttcatgagcgatatgttctgcgtattcgtcacccgcaagagcagctggcggcggtggctcctttattgtgtgcaggaatcaccacgtactcgccgctacgccactggctggccgggccgggtaaaaaagtgggcgtggtcggcatcggcggtctgggacatatggggattaaactggcccacgcgatgggggcgcatgtggtggcatttaccacttctgagtcaaaacgcgaagcggcaaaagccctgggagccgatgaagttgttaactcacgcaatgccgatgagatggtggctcatgtgaagagtttcgatttcattttgaatacagtagctgcgccacataatctcgacgattttaccaccttgctgaagcgcgatggcaccataacgctggttggtgcgcctgcgacaccgcataaatcgccggaagttttcaacctgatcatgaaacgccgcgcgatagctggttctatgattggcggcattccagaaactcaggagatgctcgatttttgcgccgaacatggcatcgtggctgatatagagatgattcgggccgatcaaattaatgaagcctatgagcgaatgctgcgtggtgatgtgaaatatcgttttgttatcgataatcgcacactaacagactgaaaaaattaataaacatcctgtggtttaacatattaacttcgctccacttaactttttagttaaggagagcgaaataatatcaaagtagtggtaaacctatagcgtaaattcagattgttaaattaacttcactactttacacgttagttatgagcgatttctgatagtgtctggttttatcagagctttattatctgcgacgtttatttttatttaagagagccacctgcaagttgttattccaccagagagtgaatcgcaaagcaggtcatcatttcatctgtatatctgtatgccaaatggcattccccctcctttttcgccgatattttgttgtgaacggcggagtttcgcttaaaaaagcaccagtagtggtttcgcagctatatggtgtataaaaaatgttctcatacagatgttttgtgaatgtgtgggttgacattcatatgaaaaaaatcataattccatcatgtttgtgtggggtcttttctgtatattacgcatcgcactcaagcctgacagaaaatatgttgtaaggctcatatcaaaaaccgccattagctcatcaggaagagcagacgacaaccaggattgttgtatggtacggggttcgaggcctcgatggcggtccaacttttcaaaacttttctgaatcagatccccttattatcatccctgcaaagtggaacattgccattgtttggctattcaagacgggtcagaccaatgaaaaagcccacacaggggagagtggctgaaatgggaagctaaagactcaagtaaacttatcggaaataaggaccacgcattacgggggctatcatcgccgatggttgggattcggcaaatcaggttgattacgtagagagtaaattatctgctcaccgctgcgtcaccccttcgtaaatcaggcgtagcgcgaatacaccaataattgcaccaataacccaactggcaacgcgttgcatacgcccataagcacgacgcactgcgggcaaagaaaacgcctgactaagaaagactcgccagataattgatgcgagcacaatccccgcccaggccattaatcgtgcccatgttggtgtttcggcatgtaatgttactgagaaaatactgataaaaaataaaacggtttgcgggttagagagatcggtaattaatccacggcggaaaaagacataccagggggcgctaatcggttgttgtagtgtgctcatttgcggtgttgagtggcggcgcatgctactacaccacgcaaaccataagagataagcgccgccgacgattctgataagcgaaaaaatctccccacactgcgtaattagcgttgcaagaccaaacaaacccaacccggaataaaatgcatcgcccagcgccacgcccagcccggtcaacacccctgcgcgtcgaccggaagccaggctggtttgtactaccacaaagagattggctcccggattaaaaaaagtaatcacgaacaatcctacggtcaggtaaacggcgtgcaaaggatccatagtgatttcatccataaataagtgaagtaacttcatcatatttctaccaaaaataatcgggtgcgagagagatcacaaagtgtcttatttccggttactggcgtttatgccctgactgaactaattattaatcaacccaataatgtgggtgggtgatagtgtgataacaactctggagccgtaatatgaaaataatctctaaaatgttagtcggtgcgttagcgtttgccgttaccaatgtctatgccgcagaattaatgaccaaagcggaatttgaaaaggttgcatcgcaatatgaaaaaataggtgatatttcaaccagtaatgaaatgtcgaccgcagatgcgaaagaagatttgatcaaaaaagccgatgaaaaaggggctgatgtgttggtactgacctctggtcaaactgacaataagatccacggcacggcaaatatttataagaagaagtaattctgaatcctatgtaaacatccccgatgcgtaagtttatcggtgatcatcatctatcgaaatttatgccggataaagcgttcgcgctgcattcggcagttcagcttttcagccgccgccagaacgtcgtccggctgatacctaaataattcgccgctgctgtcttatcgccattaaatttctccagtgcctgttgtgctgtcagcaagcctggaatgggagtcttcgccgactcgcgcgccagttccggcagtagcagctgcaaaaattgcggcgttaaatccggcgtcggttccacacttaaaaataacgccagtcgttccatcatattgcgcagttcacgaatattgcccggccagtcgtagagcaataatacaatctgacaggtctctaatccctgacgtaatgcggcagaaaaagggacagagagtgccgccagagacattttcaaaaagctttccgccagcggcagaatatccgccacccgctcgcgtagcggcggcagttgcaggcgtaaaatactcagccgataaaacaggtcacggcgaaactgcccttgctgcatatcttcttccagattgcagtgagtggcgctaatgacccgcacatctaccggaacaggctgatgcccgccgacgcgggtgacctctttttcttccagcacccgtaacaggcgagtctgcaacggcagcggcatttcgccaatctcatccagaaacagcgtaccgccgtgggcaatttcgaacagcccggcgcgacctccgcgtcgcgagccggtgaacgccccttcctcatagccaaacagctctgcttccagcagcgattcggcaatcgccccgcagttgacggcaacaaacggatgtgactttttgccctgtcgcacatcgtggcgggcaaaatattctcgatgaatcgcctgggccgccagctctttgcccgtccccgtttccccctcaatcaacaccgccgcactggagcgggcatacagcaaaatagtctgccgcacctgttccatctgtggtgattgaccgagcatatcgcccagcacgtaacgagtacgcagggcgttgcgggtggcatcgtgagtgttatggcgtaacgacatgcgcgtcatatccagcgcatcgctaaatgcctggcgcacggtggcggcagaatagataaaaattccggtcattccggcttcttctgccagatcggtaatcagccccgcgccgaccaccgcttcggtgccgttggcttttagctcgttaatctgcccgcgtgcgtcttcttcggtaatgtagctacgttggtcgaggcgcaaattaaaggttttttgaaacgctaccagtgccggaatggtttcctgataggtgacaacgccgatagaagaggtgagttttccggcttttgccagcgcctgtaacacatcgtagccactcggttttatcagaatcaccggtaccgacaggcggcttttcaggtacgcaccgttagagccagcggcaatgatggcgtcgcagcgttcgctggccagttttttgcggatgtaggccaccgctttttcaaagccaagctgaataggggtgatgttcgccagatgatcaaactcgaggctgatatcgcgaaacagctcgaacagccgcgttacagataccgtccagataaccggtttgtcgtcattcagccgtggtggatgtgccatagcgcaccgcaaagttaagaaaccgaatattgggtttagtcttgtttcataattgttgcaatgaaacgcagtgaaacattgcctgaaacgttaactgaaacgcatatttgcggattacttcatgactttatctttaactcattgaaattaaatgtttaattttattaaggcaattgtggcacactcattgctttgtctttatcaacgcaaataacaagttgataacaaaggatgggctatgtctctacactctccaggtaaagcgtttcgcgctgcacttagcaaagaaaccccgttgcaaattgttggcaccatcaacgctaaccatgcgctgctggcgcagcgtgccggatatcaggcgatttatctctccggcggtggcgtggcggcaggatcgctggggctgcccgatctcggtatttctactcttgatgacgtgctgacagatattcgccgtatcaccgacgtttgttcgctgccgctgctggtggatgcggatatcggttttggttcttcagcctttaacgtggcgcgtacggtgaaatcaatgattaaagccggtgcggcaggattgcatattgaagatcaggttggtgcgaaacgctgcggtcatcgtccgaataaagcgatcgtctcgaaagaagagatggtggatcggatccgcgcggcggtggatgcgaaaaccgatcctgattttgtgatcatggcgcgcaccgatgcgctggcggtagaggggctggatgcggcgatcgagcgtgcgcaggcctatgttgaagcgggtgccgaaatgctgttcccggaggcgattaccgaactcgccatgtatcgccagtttgccgatgcggtgcaggtgccgatcctctccaacattaccgaatttggcgcaacaccgctgtttaccaccgacgaattacgcagcgcccatgtcgcaatggcgctctacccgctttcagcgtttcgcgccatgaaccgcgccgctgaacatgtctataacatcctgcgtcaggaaggcacacagaaaagcgtcatcgacaccatgcagacccgcaacgagctgtacgaaagcatcaactactaccagtacgaagagaagctcgacgacctgtttgcccgtggtcaggtgaaataaaaacgcccgttggttgtattcgacaaccgatgcctgatgcgccgctgacgcgacttatcaggcctacgaggtgaactgaactgtaggtcggataagacgcatagcgtcgcatccgacaacaatctcgaccctacaaatgataacaatgacgaggacaatatgagcgacacaacgatcctgcaaaacagtacccatgtcattaaaccgaaaaaatcggtggcactttccggcgttccggcgggcaatacggcgctctgcaccgtgggtaaaagcggcaacgacctgcattaccgtggctacgatattcttgatctggcggaacattgtgaatttgaagaagtggcgcacctgctgatccacggcaaactgccaacccgtgacgaactcgccgcctacaaaacgaaactgaaagccctgcgtggtttaccggctaacgtgcgtaccgtgctggaagccttaccggcggcgtcacacccgatggatgttatgcgcaccggcgtttccgcgctcggctgcacgctgccagaaaaagaggggcacaccgtttctggtgcgcgggatattgccgacaaactgctggcgtcacttagttcgattcttctctactggtatcactacagccacaacggcgaacgcatccagccggaaactgatgacgactctatcggcggtcacttcctgcatctgctgcacggcgaaaagccgtcgcaaagctgggaaaaggcgatgcatatctcgctggtgctgtacgccgaacacgagtttaacgcttccacctttaccagccgggtgattgcgggcactggctctgatatgtattccgccattattggcgcgattggcgcactgcgcgggccgaaacacggcggggcgaatgaagtgtcgctggagatccagcaacgctacgaaacgccgggcgaagccgaagccgatatccgcaagcgggtggaaaacaaagaagtggtcattggttttgggcatccggtttataccatcgccgacccgcgtcatcaggtgatcaaacgtgtggcgaagcagctctcgcaggaaggcggctcgctgaagatgtacaacatcgccgatcgcctggaaacggtgatgtgggagagcaaaaagatgttccccaatctcgactggttctccgctgtttcctacaacatgatgggtgttcccaccgagatgttcacaccactgtttgttatcgcccgcgtcactggctgggcggcgcacattatcgaacaacgtcaggacaacaaaattatccgtccttccgccaattatgttggaccggaagaccgccagtttgtcgcgctggataagcgccagtaaacctctacgaataacaataaggaaacgtacccaatgtcagctcaaatcaacaacatccgcccggaatttgatcgtgaaatcgttgatatcgtcgattacgtgatgaactacgaaatcagctccagagtagcctacgacaccgctcattactgcctgcttgacacgctcggctgcggtctggaagctctcgaatatccggcctgtaaaaaactgctggggccaattgtccccggcaccgtcgtacccaacggcgtgcgcgttcccggaactcagtttcagctcgaccccgtccaggcggcatttaacattggcgcgatgatccgttggctcgatttcaacgatacctggctggcggcggagtgggggcatccttccgacaacctcggcggcattctggcaacggcggactggctttcgcgcaacgcgatcgccagcggcaaagcgccgttgaccatgaaacaggtgctgaccggaatgatcaaagcccatgaaattcagggctgcatcgcgctggaaaactcctttaaccgcgttggtctcgaccacgttctgttagtgaaagtggcttccaccgccgtggtcgccgaaatgctcggcctgacccgcgaggaaattctcaacgccgtttcgctggcatgggtagacggacagtcgctgcgcacttatcgtcatgcaccgaacaccggtacgcgtaaatcctgggcggcgggcgatgctacatcccgcgcggtacgtctggcgctgatggcgaaaacgggcgaaatgggttacccgtcagccctgaccgcgccggtgtggggtttctacgacgtctcctttaaaggtgagtcattccgcttccagcgtccgtacggttcctacgtcatggaaaatgtgctgttcaaaatctccttcccggcggagttccactcccagacggcagttgaagcggcgatgacgctctatgaacagatgcaggcagcaggcaaaacggcggcagatatcgaaaaagtgaccattcgcacccacgaagcctgtattcgcatcatcgacaaaaaagggccgctcaataacccggcagaccgcgaccactgcattcagtacatggtggcgatcccgctgctgttcggacgcttaacggcggcagattacgaggacaacgttgcgcaagataaacgcatcgacgccctgcgcgagaagatcaattgctttgaagatccggcgtttaccgctgactaccacgacccggaaaaacgcgccatcgccaatgccataacccttgagttcaccgacggcacacgatttgaagaagtggtggtggagtacccaattggtcatgctcgccgccgtcaggatggcattccgaagctggtcgataaattcaaaatcaatctcgcgcgccagttcccgactcgccagcagcagcgcattctggaggtttctctcgacagaactcgcctggaacagatgccggtcaatgagtatctcgacctgtacgtcatttaagtaaacggcggtaaggcgtaagttcaacaggagagcattatgtcttttagcgaattttatcagcgttcgattaacgaaccggagaagttctgggccgagcaggcccggcgtattgactggcagacgccctttacgcaaacgctcgaccacagcaacccgccgtttgcccgttggttttgtgaaggccgaaccaacttgtgtcacaacgctatcgaccgctggctggagaaacagccagaggcgctggcattgattgccgtctcttcggaaacagaggaagagcgtacctttaccttccgccagttacatgacgaagtgaatgcggtggcgtcaatgctgcgctcactgggcgtgcagcgtggcgatcgggtgctggtgtatatgccgatgattgccgaagcgcatattaccctgctggcctgcgcgcgcattggtgctattcactcggtggtgtttgggggatttgcttcgcacagcgtggcaacgcgaattgatgacgctaaaccggtgctgattgtctcggctgatgccggggcgcgcggcggtaaaatcattccgtataaaaaattgctcgacgatgcgataagtcaggcacagcatcagccgcgtcacgttttactggtggatcgcgggctggcgaaaatggcgcgcgttagcgggcgggatgtcgatttcgcgtcgttgcgccatcaacacatcggcgcgcgggtgccggtggcatggctggaatccaacgaaacctcctgcattctctacacctccggcacgaccggcaaacctaaaggtgtgcagcgtgatgtcggcggatatgcggtggcgctggcgacctcgatggacaccatttttggcggcaaagcgggcggcgtgttcttttgtgcttcggatatcggctgggtggtagggcattcgtatatcgtttacgcgccgctgctggcggggatggcgactatcgtttacgaaggattgccgacctggccggactgcggcgtgtggtggaaaattgtcgagaaatatcaggttagccgcatgttctcagcgccgaccgccattcgcgtgctgaaaaaattccctaccgctgaaattcgcaaacacgatctttcgtcgctggaagtgctctatctggctggagaaccgctggacgagccgaccgccagttgggtgagcaatacgctggatgtgccggtcatcgacaactactggcagaccgaatccggctggccgattatggcgattgctcgcggtctggatgacagaccgacgcgtctgggaagccccggcgtgccgatgtatggctataacgtgcagttgctcaatgaagtcaccggcgaaccgtgtggcgtcaatgagaaagggatgctggtagtggaggggccattgccgccaggctgtattcaaaccatctggggcgacgacgaccgctttgtgaagacgtactggtcgctgttttcccgtccggtgtacgccacttttgactggggcatccgcgatgctgacggttatcactttattctcgggcgcactgacgatgtgattaacgttgccggacatcggctgggtacgcgtgagattgaagagagtatctccagtcatccgggcgttgccgaagtggcggtggttggggtgaaagatgcgctgaaagggcaggtggcggtggcgtttgtcattccgaaagagagcgacagtctggaagaccgtgaggtggcgcactcgcaagagaaggcgattatggcgctggtggacagccagattggcaactttggccgcccggcgcacgtctggtttgtctcgcaattgccaaaaacgcgatccggaaaaatgctgcgccgcacgatccaggcgatttgcgaaggacgcgatcctggggatctgacgaccattgatgatccggcgtcgttggatcagatccgccaggcgatggaagagtaggtcggataaggcgctcgcgccgcatccgacaccgtgcgcagatgcctgatgcgacgctgacgcgtcttatcatgcctacaggcctgaaccgtaggtcggataaggcgctcgcgccgcatccgacaccatgcgcagatgcctgatgcgacgctgacgcgtcttatcatgcctacccactgtttttacacagataagtttcccccgcctttttgcactcattcatataaaaaatatatccccctacgaaaacgattgctttttatcttcagatgaatagaatgcggcggattttttgggtttcaaacagcaaaaagggggaatttcgtgtcgcaagataacaactttagccaggggccagtcccgcagtcggcgcggaaaggggtattggcattgacgttcgtcatgctgggattaaccttcttttccgccagtatgtggaccggcggcactctcggaaccggtcttagctatcatgatttcttcctcgcagttctcatcggtaatcttctcctcggtatttacacttcatttcttggttacattggcgcaaaaaccggcctgaccacccatcttcttgctcgcttctcgtttggtgttaaaggctcatggttgccttcactgctgctgggcggcacccaggttggctggtttggcgttggcgtggcgatgtttgctattccggtgggcaaggcaaccgggctggatattaatttgttgattgccgtctccggtttactgatgaccgtcaccgtcttctttggcatttcggcgctgacagttctttcggtgattgcggttccggctatcgcctgtcttggcggttattccgtgtggttggccgttaacggcatgggcggcctggacgcattaaaagcggtcgttcccgcacaaccgttagatttcaatgtcgcgctggcgctggttgtggggtcatttatcagtgcgggcacgctcaccgctgactttgtccggtttggtcgtaatgccaaactggcggtgctggtggcgatggtggcctttttcctcggcaactcgttgatgtttattttcggtgcagcgggcgcggcggcactggggatggcggatatctctgatgtgatgattgctcagggccttctgctgcctgcgattgtggtgctggggctgaatatctggaccaccaacgataacgcgctctatgcgtcgggtttaggtttcgccaacattaccggtatgtcgagcaaaaccctttcggtgattaacggtattatcggtacggtctgcgcattatggctgtataacaattttgtcggctggttgaccttcctttcggcagctattcctccggtgggcggcgtgatcatcgctgattatctgatgaaccgtcgccgctatgagcactttgcgaccacgcgtatgatgagtgtcaattgggtggcgattctggcggtcgcgctggggattgccgcaggccactggttaccgggaattgttccggtcaacgcggtattaggtggcgcgctgagctatctgatccttaacccgattttgaatcgtaaaacgacagcagcaatgacgcatgtggaggctaacagtgtcgaataacgctttacaaacaattattaacgcccggttacccggcaaagaggggctgtggcagattcatcttcacgacggaaaaatcagcgccattgatacgcaatctggtgtgatgcccgtaactgaaaacagcctggatgccgaacaaggtttagttttaccgccgtttgtggagccgcatattcacctggacaccacgcaaaccgccggacaaccgaactggaatcagtccggcacgctgtttgaaggcattgaacgctgggccgagcgcaaagcgttattaacccatgacgatgtgaaacaacgcgcctggcaaacgctgaaatggcagattgccaacggcattcagcatgtgcgtacccatgtcgatgtctccgacgcaacgctgactgcgttgaaagcgatgctggaagtgaaacaggaagttgcgccgtggattgatctgcaaatcgtcgccttcccgcaggaagggattttgtcgtatcccaacggtgaagcgttgctggaagaggcgttacgcttaggggcagacgttgttggggcgattccgcattttgaatttacccgtgaatatggcgtggagtcgctgcataaaaccttcgccctggcgcaaaaatacgaccgtctcatcgatgttcactgtgacgagattgatgatgagcaatcacgctttgtcgaaaccgttgctgccctggcgcaccgtgaaggcatgggcgcgcgagtcaccgccagccatactacggcaatgcactcctataacggggcgtatacttcgcgcctgtttcgtttgctgaaaatgtccggtattaactttgtcgccaacccgttggtcaatattcatctgcaaggacgtttcgatacgtatccaaaacgtcgcggcatcacgcgcgttaaagagatgctggagtccggcattaacgtctgctttggtcacgatgatgtcttcgatccgtggtatccgctgggaacggcgaatatgctacaagtgctgcatatggggctgcatgtttgccagctgatgggctacgggcagattaacgacggcctgaatttaatcacccaccacagcgccaggacgttgaatttgcaggattacggcattgccgccggaaacagcgccaacctgattatcctgccggctgaaaatgggtttgatgcgttgcgccgtcaggttccggtacgttattcggtacgtggcggtaaggtgatggccagcacacaaccggcacaaaccaccgtatatctggagcagccagaagccatcgattacaaacggtaatcggctgggctaccgcgagcgtagtttatgccggatgcggcgtgaacaccttatccggcctacgtagatcactgaaattgtaggcctgataagcggagcgcatcaggtaattttgcttatttaaactgaagactcaactttaaaatctttgaaataatattgcttatcccggtcgtttatttcgcgaataacccgacaaggaacgccagcagccacgacgtttggtggaatgtcttttgtgacgacactacccgcgccaataacagaattatccccgatggtgacgcctggattaataaccacatgacttccgatccagacgttattgccaatcgttatcggaaaagagtacatctctccgttttttctcaattcatggtgtaccgggtgtcccgtaacggaaagagtaacgttgggtgcaatcagtacgttatcaccgatcgttaccgtgtagtcgtcgacaatggttaaattgaaatttgcataaaaattgcggcctatatggatgttggaaccgtaagagaaatagacggggggttctacccaggcgttttcccctaccgtggcaaacatttctttaatcagactttcccttttttcaaattctgatggatgcgagtgattaaactcatacattaacgtttttccacgaagtcttttttcaggtaagccttcgcacatatcggtaaatagcttgcctgcttttattctttctgtcatcgacatgttcattgcgatcattccgccctgatatgttggtcggataaggcgctcgcgccgcatccgacattgattgcttaagcgacttcattcacctgacgacgcagtagagaaagcgggccggggccgctaagcgtgaacacggaaattaaggtgaagcccagcgccaccagacccagcaccagataagcgccctggaaaccgatgctttcatacatattgcccgccagtacagacataaaaatcatcgccagttgcttaaagaagcagaaacagaccagataaatcgtcgctgaaaaacgcacttcaaactggctggtaatatatttaaagcagcccaccagcaggaacggtacttcaaacatatgcagcgttttcagaataactacttccagcgctgaggtggcgaacgatgagccaataatacgtacagacataatagtgccagccagcagcagggcatttttcccaccgatgcgattaatgatcagtggcgcaaagaacataatcgaggcgttaagtaattcgcccattgtcgtgacgtagccaaatacccgcgtaccctgttcaccggtagcaaagaacgaagtaaagaaattagcaaactgttggtcaaaaacatcgtaggtgcaggaaacgccaataacatacagtgacaaaaaccacagttttggctgtctgaacagttccagcgccagcttaaggctaaatgccgaatggttggcacctaccgcattggcaaccgtggctgaagagggcgcatccgttttggcgaaaaagagtaaaacggcgaggatgagtgcacagccagaacccagccagaaaacaaactgattattgatggtgaacatgatgccgacaatcgaggcacacagcgcccagccaacacagccaaacatccgcgcgcgaccaaattcgaaattactgcgacggctgactttctcgataaatgcctctactgctggcgcaccggcgttaaaacaaaagccaagataaataccaccaacaatcgatcctactaaaatgttgtattgtaacagtggtccgaagataaaaataaagaacggcgcaaacatcactaacatgccggtaataatccacagcaggtatttgcgcagcccgagtttgtcagaaagcagaccaaacagcggttggaataatagcgagaacagagaaatagcggcaaaaataatacccgtatcacttttgctgatatggttgatgtcatgtagccaaatcgggaaaaacgggaagtaggcccccatgataaaaaagtaaaagaaaaagaataaaccgaacatccaaaagtttgtgttttttaaatagtacataatggatttccttacgcgaaatacgggcagacatagcctgcccggttattattatttttgacaccagaccaactggtaatggtagcgaccggcgctcagctggaattccgccgatactgacgggctccaggagtcgtcgccaccaatccccatatggaaaccgtcgatattcagccatgtgccttcttccgcgtgcagcagatggcgatggctggtttccatcagttgttgttggctgtagcggctgatgttgaactggaagtcgccgcgccactggtgtgggccataattcaattcgcgcgtcccgcagcgcagaccgttttcgctcgggaagacgtacggggtatacatgtctgacaatggcagatcccagcggtcaaaacaggctgcagtaaggcggtcgggatagttttcttgcggccccaggccgagccagtttacccgctctgagacctgcgccagctggcaggtcaggccaatccgcgccggatgcggtgtatcgcttgccaccgcaacatccacattgatgaccatctcaccgtgcccatcaatccggtaggttttccggctgataaataaggttttcccctgatgctgccacgcgtgggcggttgtaatcagcaccgcgtcggcaagtgtatctgccgtgcactgcaacaacgccgcttcggcctggtaatggcccgccgccttccagcgttcgacccaggcgttagggtcaatgcgggtcgcttcacttacgccaatgtcgttatccagcggcgcacgggtgaactgatcgcgcagcggggtcagcagttgtttttcatcgccaatccacatctgtgaaagaaagcctgactggcggttaaattgccaacgcttattacccagctcgatgcaaaaatccgttccgctggtggtcagttgagggatggcgtgggacgcggaggggagtgtcacgctgaggttttccgccagacgccattgctgccaggcgctgatgtgtccggcttctgaccatgcggtcgcgtttggttgcactacgcgtaccgttagccagagttgtccggcgctctccggctgcggcagttcaggcagttcaatcaactgcttaccttgcgggccaacatccagaggcacttcaccgcttgccagcggcttgccatccagtgccaccatccagtgcaggaactcgttatcgctatgacggaacaggtattcgctggtcacttcgatggttcgcccggataaacggaactggaaatactgctgttggtgttttgcttccgtcagcgccggatgcggcgtgcggtcggcaaagaccagaccgttcatacagaactggcgatcgttcggcgtatcgccaaaatcaccgccgtaagccgaccacgggttgccgttttcatcatatttaatcagcgactgatccacccagtcccagacgaagccgccctgtaaacgggggtactgacgaaacgcctgccagtatttagcgaagccgccaagactgttacccatcgcgtgggcatattcgcaaaggatcagcgggcgcatttctccaggcagcgaaagccattttttgatggaccatttcggcaccgccgggaagggctggtcttcatccacgcgcgcgtacatcgggcaaataatatcggtggccgtggtgtcggctccgccgccttcatactgtaccgggcgggaaggatcgacagatttgatccagcgatacagcgcgtcgtgattagcgccgtggcctgattcattccccagcgaccagatgatcacactcgggtgattacgatcgcgctgcaccatccgcgttacgcgttcgctcatcgcgggtagccagcgcggatcatcggtcagacgattcattggcaccatgccgtgggtttcaatattggcttcatccaccacatacaggccgtagcggtcgcacagcgtgtaccacagcggatggttcggataatgcgaacagcgcacggcgttaaagttgttctgcttcatcagcaggatatcctgcaccatcgtctgctcatccatgacctgaccatgcagaggatgatgctcgtgacggttaacgccgcgaatcagcaacggcttgccgttcagcagcagcagaccattttcaatccgcacctcgcggaaaccgacgtcgcaggcttctgcttcaatcagcgtgccgtcggcggtgtgcagttcaaccactgcacgatagagattcgggatttcggcgctccacagttccggattttcaacgttcaggcgtagtgtgacgcgatcggcataaccgccacgctcatcgataatttcaccgccgaaaggcgcggtgccgctggcgacctgcgtttcaccctgccacaaagaaaccgtcacccgcagttcatcgcgcagctcgccgtacatctgaacttctgcctccagtaccgcgcggctgaaatcatcattaaagagagtggtaacttggaaatcgctgatttgcgtggtcggtttatgcagcaacgagacgtcacggaaaatgccgctcatccgccacatatcctgatcttccagataactgccgtcactccagcgcagcaccatcaccgcgaggcggttttctccggcgcgtaaaaatgcgctcaggtcaaattcagacggcaaacggctgtcctggccgtaaccgacccagcgcccgttgcaccacagatgaaacgccgagttaacgccatcaaaaataattcgcgtctggccttcctgtagccagctttcatcaatattaaatgtgagcgagtaacaacctgtcggattctccgcgggaacaaacggcggattgaccgtaatgggataggtcacgttggtgtagataggcgcatcgtaaccgtgcatctgccagtttgaggggacgacgacagtatcggcgtcaggaagatcgcactccagccagctttccggcaccgcttctggtgccggaaaccaggcaaagcgccattcgccattcaggctgcgcaactgttgggaagggcgatcggtgcgggcctcttcgctattacgccagctggcgaaagggggatgtgccgcaaggcgattaagttgggtaacgccagggttttcccagtcacgacgttgtaatacgacggccagagaatccgtaatcatagtcatagctgtatcctgtgtgaaattgttatccgctcataatttcacacaacatacgagccggacacataagagtgtaaagactggggtgcctaatgagtgagctgactcacattaattgtgttgcgctcactgcccgctttccagtcgggaaacttgtcgtgccagctgcattaatgaatcggccaacgcgcggggagaggcggtttgcgtattgggcggaagggtggtttttcttttcaccagtgagacgggcaacagctgattgcccttcaccgcctggccctgagagagttgcagcaagcggtccacgctggtttgccccagcaggcgaaaatcctgtttgatggtggttaacggcgggatataacacgagctgtcttcggtatcgtcgtatcccactaccgagatatccggcaccaacgcgcagcccggactcggtaatggcgcgcattgcgcccagtgccatctgatcgttggcaaccagcatcgcagtgggaacgatgccctcatttagcatttgcatggtttgttgaaaaccggacatggcactccagtcgccttcccgttctgttatcggctgaatttgattgcgtgtgagatatttatgccagcccgccagacgcagacgcgccgagacagaacttaatgggcctgctaacagcgcgatttgctggtgacccaatgcgaccaggtgctccacgcccagtcgcgtaccgtcttcatgggagaaaataatactgttgatgggagtctggtcagagacatcaagaaataacgccggaacattagcgcaggcagcttccacagcaatggcatcctggtcatccagcggatagttaatgatcagtccactgacgcgttgcgcgagaagattgtgcaccgccgctttacaggcttcgacgccgcttcgttcaaccatcgacaccaccacgctggcacccaattgatcggcgcgagatttaatcgccgcgacaatttgcgacggcgcgtgcagggccagactggaggtggcaacgccaatcagcaacgactgtttgcccgccagttgttgtgccacgcggttgggaatgtaattcagctccgccatcgccgcttccactttttcccgcgttttcgcagaaacgtggcaggcctggttcaccacgcgggaaacggtctgataagagacaccggcatactctgcgacatcgtatagcgttactggtttcacattcaccaccctgaattgactctcttccgggcgctatcatgccataccgcgaaaggttttgcgccattcggcggggctgacgccgaagtgagatttaaaatgctgacgccaggtcacaggtgagagaaaacccacgccaatacacctacggcgtttacaggtatactcgctaaaaattattcagtgggtttggaaacaaagatggcaaaacttaccttacaagagcagttgctcaaagcgggactagtcaccagcaaaaaagcggcgaaggtcgagagaacagcgaaaaaatcgcgtgttcaggcgcgtgaagctcgggcggcggtagaagaaaataaaaaggcacagcttgagcgtgataaacagcttagcgagcagcaaaaacaagcggcgttggcgaaagaatataaagcccaggtgaagcagctcattgaaatgaaccgaattatcattgccaatggcgatattggttttaacttcactgacggcaatctgattaagaagatttttgttgataagctcacgcaaacgcagttgattaatggtcgtctggcgattgctcgcttgttggtcgataacaatagcgaaggtgaatacgccattattcccgccagcgttgccgataaaattgctcagcgtgatgccagcagtattgtgttgcacagcgcgctcagcgccgaagagcaggatgaagacgatccgtatgccgacttcaaagtgcctgatgatttgatgtggtaaacatagataaatcgtgtgcagatgcctgatgcgacgctttgcgagtcttatcatgcctacggtttatgggcgaagtgtaggccggataaggcgttcacgccgcatccggcagccgtgcgcagatgcctgatgcgacgcttttcgcgtcttatcaggcctacggcttacgggtgaaatgtaggccggataaggcgtttacgccgcatccggcatgcgtgcgcggatgctcaacgcatattcagtttattggcgtggtacgcaatatgctcgccaataaaactggagacaaaataatagctgtgatcataaccctcgtgataacggattaacgtcttgatattcatctcctggcagatcttttcaagatttgaagtccgcagttgttctgcgtaaaaatcatcactcaacccctgatcaaccatgatttccgcaacgcgttgaccttgtgaaataagactcaccgggtcgtaatccaaccaggcatctttattttcaccaagatatgcggcaaaggcttgctgtccccacggtacttgcgatggggagacaatgggcgaaaacgccgagacgctggcatattcatctgggttacgtaacgccagcaccagcgcgcccagcccgcccatagaatgacctgagatagactttctggccgttgctggaaaatgatgcatcactaaattcggcagctcgttgcggatatagtcatacattttgtaatgttcattccacggcgcttgcgtcgcgttcaggtaaaacccggcaccttgcccgagatcgtaacggtcagcatctgcgacatgactgcctcgcggactggtgtccggcgcaacaacaataatgttgtgctcagccgcgtaacgctgcatccccgatttagtaatgaaattctgctcgttgcaggtcaggcctgaaagccagtacaacaccggcaatttttcattctcggcttttggtgggagatagacgccgacattcatttcacatttcagtgattgggaataatgccgatacacattttgccagccgccaaagctggcatgtttttcaatgagttccatcagtcattatctcacggttaatcccccggacggctgcccggggagagtattaagaaccccatctgaactggacggggtaaaccagcgggaaatcagtaacgaattacggttcgaatggatttaccttcatgcatcaggtcgaaggcgtcattaatttcatccaggctcatggtatgcgtgacaaacggttccagatcgatatcacctttcatcgcatcttcaaccatacccggtaactgggaacgacctttcacgccgccaaacgcggaacctttccatacgcgaccggtgaccaactggaatggacgggtggagatttcctgaccagatcctgcgacaccgatgatcaccgattgaccccagccgcggtgcgcactttccagcgccgcacgcatcacgttgacgttaccgatgcattcaaaggtatggtcgataccccatttgttgatatccagcaggacatctttaatcggtttgtcgtagtcattcgggttaatgcagtcggtggcaccgaagcgacgcgccagttcgaatttcttcgggttggtatcgatagcgataatccgtcccgctttcgcctgacgcgcgccctgaaccactgccagaccaatcgcgccaagaccaaacacggcaacagaatcacctggctggactttagctgtgttgtgtaccgcgccaataccggtggtcacgccacagcccagcaggcagacgtgttcatggttcgcttctggattaattttggccagagacacttccgctaccacggtgtattcactgaatgttgagcatcccatgtagtgataaagcggctgcccgttgtaagaaaaacgggtggtgccgtctggcatcaagcctttgccctgcgtttcgcgaaccgcgacacacaggttagttttgccagaacgacagaactcacactcgccgcactctgcggtgtaaagcgggatcacatggtcgccaggtttgacgctggttaccccttcaccgacttcaactacaaccccggccccttcgtgaccgagaaccaccgggaagacaccttccgggtcatcgccggagagggtaaatgcgtcggtatggcaaacaccggtatgggtgactttaatcagcacttcaccttttttcggtggtgcaacgtcaatttcaacgatttccagcggtttaccgggagcaaatgcaacggcagcacgtgatttcatctctcgctcttcctcaatatggtaatagattcagctatttaagataggcacgaaccagttcaatagtgtcgtcaacggattggctgacttcgcggctgtagcagtcatttcggtcaaacgtttcccggatatggctttcaagcacttctgccatcagcccgttagccgcgccccgaacggcagcgatctgttggagtatggcacggcattcggcatcaccctccagcgaccgttccagagcatcaatctgcccccgaatacgacgaactcgagtaaggacctttttcttctcttccggagtactgggcatttcgcacctcatcatctgcatgcaatatactataggggggtatgctatatgtcaatgcatacccccctatagtatataacactggagaataaaatttatccggtgaatgtagtcggaaaacaaagaggaaagggggggggctaatctgcagggaaggccgccccggatagcgggcggcagaaggaatcagaatttccaggtcagatgggctgcaagttgcagaccgttataatcatcggttggggtgtcgtaccacactttacctgccgtcaacccgagattaagttgctcagtcagcggttgaatacgttgcaaactgatgctcttcatgctgccgtagcgtgtttctggcgtccagtcgtaggtgtaagcacctgttccgcggcttagccatagttgcgtgtaaccagtgccgcgcgggtcattcagacgcacggaaatcatattgctgtaactaccacctgcatcgctggagtcatagtgggtatagcgatagctggtgatcaccgggccagtatagagtgatatgccgccttgccaggcatcgacttcgacatcatcgtaatatttagtgtagcgataaccggtcgtgaaaagcgtttttggcaacagggccaggctaatatcctgacgaaaatcctggcaggcaaagaccggcgtattatccgcaaaggcaatactcgttcgggttgtcagccagttattccatttgtaccagactgcaccctggccgcgagtggcattgaaatgttcagtttcataatcacgacgcccctgggaaagattaaaaagcagcgttgcgttttcaactttcgccaccagttcagcatacgctaaattacggttgccatgatcgccagaataatcggtaaaatcgtagcccgcggtaatggaagttaacccggcataaacgggtaatgcgctaaaaattgccgccgctaataacgtatgctttatcattttaatctcctgtacggataagttcttgtcggagtgaataagttccggtaggtaaattacgttctacaatcacgcgcgggccaagttgcgtgttcggggaaataattcgcccaggcaaaataataacttgtacgccaaggcgtgaacgcttcccgatataacaacctaatttatcgcatccggtagcgataattccatctggagttcgaacagacacgggttgttcatccagacgatgattactggtacgtacttgtgcgcccaaatatgcctggtttgcaactaccgagtcggcaataaagcattgcggaccaatcgttgcttccgcttcaataaccgcatttttaatttcggtggcaaaaccaatttttacgccattgctgattattgtgccaggacgaataaacgcataattacctatcaggcagtttgcgccaatcactaccggaccctgaataacggcaccgtggcaaatacgggtattcgcgccgataacaacctcaccggcactttcatcaataatcacctggtctgcaatctgaacatttttctctttagcattaagcttcagatagtttttcagttcctgtgacagaagggtgggaataagcggttgacgcttccaccagtgcggaatagcgggtgggtttgtcgcgctgaggttcgcgtccagtaaaaaaggcaataagtccataaataatccagatggcataagctaataatacatacacaacggaaagcggtgctaaaggcaccaacaaccagcaacgatgaaaccaggcgctaaatgcaccaataacacaaactacgccgacccagataagcgggaacattgccaacaccacaccatgtggcccggtggtgatgaattcattaaaccaggtagtgagataaataccaacgccataaagcacaaccaacagcataggaaatatactgaagataccgaagcggctaaataaaagtcttttatgcaggcgcatacagaccgcgtagcccacaatccaacgccgccagcgacgccattcctcacgcgggctgttgcattcctgtgggtatacgatgcagcgattcgcctgccgaatacgatagccgtttgccaccaatgtccaggtgagatcaaggtcttcgactttagtacgatccgagaaaccgaacttacgcaatacatcagaccgggccagtatagagtgatatgccgccttgccaggcatcgacttcgacatcatcgtaatatttagtgtagcgataaccggtcgtgaaaagcgtttttggcaacagggccaggctaatatcctgacgaaaatcctggcaggcaaagaccggcgtattatccgcaaaggcaatactcgttcgggttgtcagccagttattccatttgtaccagactgcaccctggccgcgagtggcattgaaatgttcagtttcataatcacgacgcccctgggaaagattaaaaagcagcgttgcgttttcaactttcgccaccagttcagcatacgctaaattacggttgccatgatcgccagaataatcggtaaaatcgtagcccgcggtaatggaagttaacccggcataaacgggtaatgcgctaaaaattgccgccgctaataacgtccgttttatcattttaatctcctgtacggataagttcttgtcggagtgaataagttccggtaggtaaattacgttctacaatcacgcgcgggccaagttgcgtgttcggggaaataattcgcccaggcaaaataataacttgtacgccaaggcgtgaacgctgcccgatataacaacctaatttatcgcatccggtagcgataattccatctggagttcgaacagacacgggctgttcatccagacgatgattactggttcgtacttgtgcgcccaaatatgcctggtttgcaactaccgagtcggcaataaagcattgcggaccaatcgttgcttccgcttcaataaccgcatttttaatttcggtggcaaaaccaatttttacgccattgctgattattgtgccaggacgaataaacgcataattacctatcaggcagtttgcgccaatcactaccggaccctgaataacggcaccgtggcaaatacgggtattcgcgccgataacaacctcaccggcactttcatcaataatcacctggtctgcaatctgaatatttttctctttaacattaagcttcagaaagtttttcagttcctgtgacagaagggtgggaataagcggttgacgcttccaccagtgcggaatagcgggtgggtttgtcgcgctgaggttcgcgtccagtaaaaaaggcaataagtccataaataatccagatggcataagctaataatacatacacaacggaaagcggtgctaaaggcaccaacaaccagcaacgatgaaaccaggcgctaaatgcaccaataacacaaactacgccgacccagataagcgggaacattgccaacaccacaccatgtggcccggtggtgatgaattcattaaaccaggtagtgagataaatcccaacgccataaagcacaaccaacagcataggaaatatactgaagataccgaagcggctaaataaaagtcttttatgcaggcgcatacagaccgcgtagcccacaatccaacgccgccagcgacgccattcctcacgcgggctgttgcattcctgtgggtatacgatgcagcgattcgcctgccgaatacgatagccgtttgccaccaatgtccaggtgagatcaaggtcttcgactttagtacgatccgagaaaccgaacttacgcaatacatcagtacggaacatcccgcaggcaccgctgatgataaacggtgcgccgcccagaagctgctgtagcgtgcgcttcataacaatcatcggcaactttacggtcgcgcggatgtgtggtaacagacccgcgcctttcaacgcagtagagggaatgccgcctacggcatcagcgccacgctcaatttccgccagcatatagcccattccgtcttgatcgggcggaacataggtgtcggcatcacttaaaaaaacctgatcgcaggtggcgtaattgaggccattcatcagcgcaccacctttaccggtatttttttgcgtgacggcaacaaagcggtcgccccatttgcgtttgacttccgccatgaccgcttcggtattgtccgtggagccgtcgttaacgcaaattacccggcaaaaataagggttacgcagcagattatccagtgactgcgccagacacgggccttcgttataagcaggtataatggcgtcaatacagcctttcttttggctgggcttacgccttaacgtactcagaaaccatagcaatattgctacggccatacatataaagatccaggttttcatgcaatttgctcaaagaatcattttatgaataacaaaaccttcacccagatcgctattgacctgttgcccgcgaaattgagcaactgcacgcagacgctccgggcgcatataatctcgctggctctgacttttatgtttttttaacgcagtcagtttaagagaaaaatattcttctttcacggattcaaaaacctgaggcataaatgaaagccaggtacttggtgtttcatagccgagaatttgcggaatagcgcgacaggcaaccattgaggcttgatagactgcaagatgatcctgatggcggtcagcatcatgcatggtatatacacgtataatttcaacatcagagggaatttgattttttatgatgttttccagggcagaaatcatatcattgagctgtaaatgagcgcgggtgtcagcaaaattaagatgaatagtttggtggcaccctaatatctttagagcgttgcgtgattcttcgtggcgatcgattattccatctacgccagaattaccggtagtcatcaccacggtagcaatataaattcctttttgcgcaaggcgagctagcgatgcgccacagcctaattctatatcgtcaggatgcgcgccaatggcaaggataccctttcttttatttgccgaagaaaggatcgctgaatctaaaaccttatccactttatgacactccattttatttattatactacaagcacaacgacgcccccagagacgtaacctctgacgcagacagatgctaatttttaagtgttaaaaatagctgatagctgaaaaacaaggggctgtcaggtacggggataagagtgtgtaatcttttatgtagttcatatgttaagtgtttgtgtgtttggtttgtatggttattttgttttatatattgtatttaaatgtgatttagtttgtcaattaattgcatattaaaaatatgttctatgcacaaatattgattatatacattatgtgaatacattatgtggttgattgagaatgatacatttatatatgcaatgtgaatataatggtttcattatatgtgttgctgttaataaaataacagacattagaacctgcttgtttatgcattaataaaatgaagtgcagtaatttactgagttatcagagtgggcgtaattgcatatttaatctttcctttgccgcttttttgctaagaataaaatcatctgtacgataacgactaattcttttaatgaatgtttttattcctgaatactgctcccataacaagacgggggagcagacaatcatggcaatttcatcgcgtaacacatttcttgccgcactggcattcatcgcttttcaggcgcaagcggtgaacgtcaccgtggcgtatcaaacctccgccgaaccggcgaaagtggctcaggccgacaacacctttgctaaagaaagcggagcaaccgtggactggcgtaagtttgacagtggagccagcatcgtgcgggcgctggcttcgggcgacgtgcaaatcggcaacctcggttccagcccgttagcggttgcaaccagccaacaggtgccgattgaagtcttcttgctggcgtcaaaactgggtaactccgaagcgctggtggtaaagaaaactatcagtaaaccggaagacttgattggtaaacgcatcgccgtaccgtttatctccaccacccactacagcctgctggcggcgctgaaacactggggtattaaacctgggcaagttgagattgtgaacctgcagccgcccgcgattatcgccgcatggcagcggggagatattgatggtgcttatgtctgggcaccggcggttaacgccctggaaaaagatggcaaggtgctgaccgattctgaacaggtcgggcagtggggcgcgccgacactggacgtctgggtcgtgcggaaagattttgccgagaaacatcctgaggtcgtgaaagcgttcgctaaaagcgccatcgatgctcagcaaccgtacattgctaacccagacgcgtggctgaaacagccggaaaacatcagcaaactggcgcggttaagcggcgtgccggaaggtgacattccggggctggtgaaggggaatacctatctgacgccgcagcagcaaacggcagaactgaccggaccggtgaacaaagcgatcatcgacaccgcgcagtttttgaaagagcagggcaaagtcccggctgtagcgaatgattacagccagtacgttacctcgcgcttcgtgcaataaaaggaggcgcagatgctgcaaatttctcatctttacgccgattatggcggcaaaccggcactggaagatatcaacctgacgctggaaagcggcgagcttctggtagttctggggccgtctggctgcggcaaaactacgttgctgaatttgattgctggttttgtgccttatcagcatggcagcattcaactggcgggtaagggtattcagggaccgggagcagagcgtggcgtagtttttcagaatgaagggttgttaccgtggcgcaatgtacaggacaacgtggcgttcggcctgcaactggcaggtgtagagaaaatgcagcgactggaaatcgcacaccagatggtgaaaaaagtcgggctggaaggcgcagaaaaacgctacatctggcagctttccggtggtcaacgtcagcgggtggggattgcccgcgcgttggcggcaaatccccagctgttattactcgacgaaccgtttggtgcgctggacgccttcacccgcgaccagatacaaaccctgctgctgaaactctggcaggagacgggaaagcaggtgctgttgattacccacgatatagaagaagcggtgtttatggcgactgaactggttctgctttcacccggcccaggccgcgtgctggagcggctgccgctcaacttcgcccgccgctttgttgcgggagagtcgagccgcagcatcaagtccgatccacaattcatcgccatgcgcgaatatgttttaagccgcgtatttgagcaacgggaggcgttctcatgagtgtgctcattaatgaaaaactgcattcgcatcggctgaaatggcgctggccgctctcgcgtcaggtgaccttaagcattggcacgttagcgattttactcactgtatggtgggtagtcgcggcgctgcaactgattagcccgctgtttttgccgccaccgcaacaggtactggcaaaactgctcaccattgccgggccgcagggatttatggacgccacgctgtggcagcatctggcagccagcctgacgcgcattgtgctggcgctactcgcggcggtgttgatcggtattccggtcgggatcgccatggggctaagcccgacggtgcgcggcattctggatccgataatcgagctttatcgtccggtgccgccgctggcttatttgccgctgatggtgatctggtttggtattggcgaaacctcgaagatcttactgatctatctagcgatttttgcgccggtggcgatgtcggcgctggcgggggtgaaaagcgcgcagcaggttcgcattcgtgccgcccagtcgctgggtgccagccgtgcgcaggtgctgtggtttgtcattttgcccggcgcgctgccggaaatcctcaccggattacgcattggtctgggtgtgggctggtctacgctggtggcggcggagctgattgccgcaacgcgcggtttaggatttatggttcagtcagcgggtgaatttctcgcgactgacgtggtgctggcggggatcgcggtgattgcgattatcgcctttcttttagaactgggtctgcgcgcgttacagcgccgcctgacgccctggcatggagaagtacaatgagtgaacgtctgagcattacctcgctggggccgtatattggcgcacaaattacgggggccgacttaacgcgcccgttaagcgataatcagtttgaacagctttaccatgcggtgctgcgccatcatgtggtgtttctgcgcgatcaagctattacgccgcagcagcaacgcgcgctggcccagcgttttggcgagctgcatattcaccctgtttaccctcatgctgaaggggttgacgagatcatcgtcctggatacccataacgataatccgccggataacgacaactggcacaccgatgtgacatttattcaaacgccacccgcaggggcgattctggcggcgaaagagttaccctcgaccggcggcgatacgctctgggccagtggtattgccgcatatgaggcgctctctgttcccttccgccagctgttgagcgggttgcgtgcggagcatgatttccgtaaatcgttcccggaatacaagtaccgcaaaaccgaggctgagcatcaacgctggcgtgaggcggtcgcgaaaaatccaccgttgctacatccggtggtgcgaacgcatccggtgaccggtaaacaggcgctgtttgtgaacgaaggttttaccacacgaattgttgatgtcagcgagaaagagagcgaagccttgttaggttttttgtttgcccatatcactaaaccggagtttcaggtgcgctggcgctggcaaccgaatgatattgcgatttgggataaccgcgtgactcagcactatgccaatgcggattacctgccacagcggcggattatgcatcgggcgacgattcttggggatattccgttttatcgggcggggtaagggggaaatgccgggttggataacccggcataatgatcattaacgcagaatcttcttctcagccaaatccagcgcaaagtagctgaaaatcagatccgcacccgcacgcttaatcgaacctaagctttcgagcacgactttctcttcatctatagcacccgccagcgcggagaacttaatcatcgcgtactcaccgctcacctgatacgcgccaatcggcaattcagtacgttcacgcagctcacgcacgatgtcgaggtatgctccggcaggtttaaccatcaggcagtctgcgccctgggcttcatccagcagcgactcacgaatcgcctcacgacggttcattgggttcatctgatagcttttgcggtcgccttttaatgcgcttccggcagcttcacggaacgggccataaaaggaggaggcgaacttggtcgaatacgacataatcgccgtatctttaaagcccgcagcgtccagcgcctggcgaatcgcctgtacctgaccatccatcgcggcagaaggggcgatgaagtctgcgcctgcagcagctgcaaccacagcttgcttgcctaaattttccagagtcgcgtcgttgtcgacgccatgctcgcacagaacaccgcagtgaccgtgagatgtgtattcacagaagcaggtgtctgacataacgatcatttctggcacggtctgcttgcagatgcgcgacatacgcgccaccagtccatcttcccgccaggcatcgctgccggtttcatcggtatggtgagagatgccgaaagtcatcacggaacgaataccggcgttggcgatgcgttcaatttcgcgtgccagatgtttctctggaatgcgcatcacgcctggcatggcttcaacggctttgtagtcgtcaatttcttcttcaacaaagatcggcaacaccaggtcgttaaggctaagtgttgtctcttcaaacatagcgcgcagcgcaggagatttgcgcaggcgacgagggcgttggattaaatctgtcatggtctgcctgatgtttgtggaatcgaggagcatagtatacctgaagcaggctgggtgtgttttacgaaagttgtcgcgatgttgacaaaaagagaatgaaaaagaggtcaggacatctttgtaatagaaatagcaataatttcatattcactgaaaatatttttaatttttatttatagccatagattattgtttttggggatttggtgacgtttccaaaaagtgaatagcttaaagttcattgcttattgatacattatttgtctgtttttgttgttttatattttcatggtctatgttttaaaattaacgctttcattaacgtattgaaatattgtgtttttgttatttctttctttgtgtgtgttcacgtgctttatatatgtccgcaatcggacttaggggaaagaataattgaaccattcctctataacgccgcataatcgtaaacgcgaaacataatatgttttctatgcattgataattgatggatcaacttattacgtccctgaggagggatgacaaatgcactcctggaaaaagaaacttgtagtatcacaattagcattggcttgcactctggctatcacctctcaggctaatgcagcaaactatgatacctgggggtatcatgacaacaccacgaccgatttagtttggccgtatgacactgacaatgatggaattgccgatgctggcggcatggacccgatgggttcagacggtaactacgtaacttacaatggttttgtttactataacaatgccaatggcgatttcgatactgtctttaaaggcgataccgttaacggtaccatttctacttattacttgaatcatgattacgctagcggttctgttaaccaggtagatatcagcaattcagtaattcatggggcaatcacctctgaactgccatttggttattacagcattactcctgcagaagttaatgctaaaggtgaagttgtaactccacagacctataatggctataatttctataacggaatcactactgaccttgactacaattggtacgatggtgacgtattcactctgaacgtatccaattccaccattgatgatgactatgaagctctttacttcactgacacatatcttgatggtgataaatctaagtcaaccaatgaaacgttctataccgctctgggtgttgcagtaaatcttgatgttgaaagcaatatcaatattactaacaactcccgtgtagctggtattgcgctgtctgaaggcaatacaagcaacacgacttatactagcgaatatcatcagtgggacaacaacattaatgtgtctaactccactgtaacttcagggtcacagactccgctggaagaaagcaatggcttcttcggtaaatctgctgaaccaagtgattacgctggtaatggtggcgaaaatgacgtagctctgtcattctctgacaatgctggctcaaattattccatgaaaaacaatgtaaactttgaccattcaaccctgttgggtgatgtcgagttcacaagccactggaataacgatggcgtattcttctattcaaccggccatgacagcaatggtgacggtgtccttgataccaacggtggttgggtagatgatgctcagaacgttgatgaactgaacattactctgaacaacggtagtaagtgggttggctcagcaaacatgagtgctgaagtaattgctccggcagatatgtatgatgttgcgccgaacagcctgacccctggtgccactatcgaagctaacgattggggtcgtattattgacaacaaggtattccagagcggcgtatttaacgtagcactgaacaatggttcagaatggaataccgttaatagttcagtaattgatacattagctgtaaataatggctctcaggtaaatgttactgattcctctctggtctcagataccattggtttaaccaacggctcctcactgaatattggtgaagatggtttggttgctacagaccacctgactgttgatagctacagtaccgttaatttaaccgaatctactggctggaataactattctaacctgtatgccaataccatcaccgtaactaacggtggtgtactggatgtgaacgttgatcagtttgatactgaagctttccgtactgacaaactggaactgactagcggcaacatcgctgaccacaacggcaatgtagtttctggtgtgttcgatatcaacagcagcgattatgttctgaacgctgacctggtgaacgaccgtacttgggataccgctcaggctaactacggctacggtgttgttgctatgaactctgatggtcatctgactatcaacggtaacggcgacgtagacaacggtactgaactggataacagttctgtagacaacgttgttgcggcaaccggtaactacaaagttcgtatcgacaacgcaactggcgctggcgcaatcgctgattacaaagataaagaaattatctatgtaaacgacgtcaacagcaacgcgaccttctctgctgctaacaaagctgacctgggtgcatacacctatcaggctgagcagcgtggtaacaccgttgttctgcaacagatggagctgaccgactacgctaacatggcgctgagcatcccgtctgcgaacaccaatatctggaacctggaacaagacaccgttggtactcgtctgaccaactctcgtcatggtctggctgataacggcggcgcatgggtaagctacttcggtggtaacttcaacggcgacaacggcaccatcaactatgatcaggatgttaacggcatcatggtcggtgttgataccaaaattgacggtaacaacgctaagtggatcgtcggtgcggctgcaggcttcgctaaaggtgatatgaatgaccgttctggtcaggtggatcaagacagccagactgcctacatctactcttctgctcacttcgcgaacaacgtctttgttgacggtagcttgagctactctcacttcaacaacgacctgtctgcaaccatgagcaacggtacttacgttgacggcagcaccaactccgacgcttggggctttggtttgaaagccggttacgacttcaaactgggtgatgcaggttacgtgactccttacggcagcgtttctggtctgttccagtctggtgatgattaccagctgagcaacgacatgaaagttgatggtcagtcttacgacagcatgcgttatgaactgggtgtagatgcaggttataccttcacctacagcgaagaccaggctctgactccgtacttcaaactggcttacgtctacgacgactctaacaacgataacgatgtgaacggtgattccatcgataacggtactgaagggtctgcggtacgtgttggtctgggtactcagttcagcttcaccaagaacttcagcgcctataccgatgctaactacctcggtggtggtgacgtagatcaagactggtccgcgaatgtgggtgttaaatatacctggtaatattcttcactccgaagaaataggtaatttaatctaaataatgcccgtcaaggatttgacgggcattactgcaaaggacgcgcaaatgttatctgtagttaaacctcttcaggaatttggtaagctcgataaatgtttgtccagatacggtacgcgcttcgagtttaataatgaaaagcaagttatattttccagtaatgtcaatagcgaagatactttcgttattttagagggcgttatctctttgcgtagagaagaaaacgtacttatcggtattacacaggctccttatattatggggctggctgatggtttaatgaaaaacgatataccatacaaattaatatcagaaggaaactgtacgggatatcatttgccagccaaacaaaccattactcttattgaacaaaatcaactctggcgagacgctttttactggttagcctggcaaaatagaattctggaattacgcgacgttcagctcattgggcataattcctacgaacaaatccgcgcgacgttattatcaatgattgactggaatgaagaattgcgatcacgtattggcgtgatgaattatatccatcaacgtacacgtatatcgcgttctgtcgttgcggaagttcttgctgctttgcgtaaaggcggctatatcgaaatgaataaaggcaaactggtcgctatcaaccgtttgccttcagagtattaatcaggatgcggggataaccaacggtttattcccgcttagctcggtcaccaggtcattgatgccatcgctcatatttttaaagcgcgtcaacggcgaacgagtgaccaccacaaacgcgccaatattcttctgcgggatcatcgccatataggtaatgaaaccgccaccaccacctgtcttctgaataatccccggacgaccctctttcggggccatatatacccagcctaaaccaagcgcatccgctttgccggggacatccatgccaatcacttttgtaaactgcgcgcgctgataaatcaacgtctgcatgcgatcagcctggttactgcgctgataaaaatcagatgacaaatactgctgcatccagcgcatcatatcgcctggcgtggaatagacgccgccgctgccaattgccgccagcgtgttattgcacggactggcaccgcgctcagcaaccattaaacggcggcactgatccggtgagggggtgtaggtggtgtctttcatccccaacggacgggtaatctgctcttcaaacaactgggtataaggcttgccggacgcattcgccagtgcatctgccagcagatcgaatgcgaggttggagtacgcggcctggctgcccggcgcggcttttagtttggcagtggaaaggtatttccagcgttgctcgcgcgttggccagacaaataccggacgatgtgccgcgccaccgggctgttcacggggcagggcgctggtatgggttgccagattcaccagcgtaatgggcgtcccattgtaggtcggtacgcgtgcgcctggcggagcatatttacttagcggatcgtttaacttcacggtcccctggtcgagcaatttcaccagcatctcactggtcattaacttggtgagggaagcaatacgtatgacggaatccagctgcgggcgaacgttattaccaggtcgcgtttcgccataactgcgaaagacgcgctggttaccgtcgataacaaccagcgccatccccgtggcaccgctgccgtaaaaaatatgatcggcataacgatcgacaatatcagaggcaaactccggttcagtgatcggctgcgccgcatggacggaggtcaatgacgccgcatacagcacggcagaaaaaagcagactacgtttcaacggtggtgtccatagattgaatgaaggtaactgagcgtatttatactactcattgatggattgcaaagggcgaattagtgcaataatagtgttaaaaacgtaacggcgcgtaaacacgatctttttcctgctcaccaatgcctgcatttgtgatcctgcgcgtgttaatccgcttatgtaaacaatctttggtttgtgaaacccgtcgaaacaattcttatggtcaggctggcgaactaagcgccttgctatgggtcacaatgggcagtttcatttggctgacgctttgtagcggtcatgcggttaatacacagcagttgttaaaacgataagaagttagcaggagtgcatatgtttaagtcttttttcccaaagccgggaacgttttttctctcggcctttgtttgggcattgattgccgttatcttctggcaagccggtgggggtgattgggtggcgcgtatcaccggcgcttccgggcagatcccgattagcgccgcgcgtttctggtcgttggatttcctgattttttacgcttactacattgtttgcgtaggactttttgcattgttctggtttatctatagcccgcaccgttggcaatactggtcaatactcggtactgcgctgattatcttcgtcacctggtttttggtggaagtcggggttgccgtcaacgcctggtatgcgccgttctatgatctgattcaaacggcgctaagttcgccgcataaagtcaccatcgaacaattttaccgcgaagtgggcgtctttctggggattgcgctgatcgcggtggtgatcagtgtgctgaacaacttctttgtcagtcactacgtgttccgctggcgtacggcgatgaacgaatattacatggcgaactggcaacaactgcgtcatatcgaaggggccgcgcagcgtgtgcaggaagacaccatgcgttttgcttcaacgctggagaatatgggcgtcagctttatcaacgctatcatgacgttgatcgccttcctgccggtgctggtaacgctctccgcacatgtgccggagctgccgattgtcgggcacattccgtatggtctggtgattgccgctatcgtctggtcgctgatggggaccggattactggcagtggtagggatcaaactgccggggctggagtttaaaaaccagcgtgtagaggctgcctaccgtaaagagctggtttatggtgaagacgatgccacgcgcgcgacgccgcctacggtacgcgagctttttagcgccgtacggaaaaactatttccgcctctattttcactatatgtatttcaatatcgcccgcattctctatttgcaggtcgataacgttttcggtttgttcttgctgtttccgtcaattgttgccggtacgattacactcggcctgatgacgcagattactaacgtttttggtcaggttcgcggtgctttccagtacctgattaactcatggaccacactggttgagttgatgtctatctacaaacgtctgcgcagctttgaacatgagctggatggtgacaaaattcaggaagtaacccataccttgagctaaaaaggagaagtaatgtcgcgcgtcaatcctctatcttcgctgtcattgttggcggttctggttttagcggggtgtagtagtcaggctccgcaaccgttgaaaaagggcgaaaaagcgatagatgtggcgagcgtcgtgcggcagaagatgcctgcgagcgtgaaagaccgcgatgcctgggcgaaagatctcgccaccacctttgaaagtcaggggctggcaccgacgctggaaaacgtctgctcggtgctggcggtggcgcagcaggagtcaaattatcaggcagatccggccgttccgggcttaagcaagatcgcctggcaagagattgaccgtcgtgctgaacggatgcacattcctgcttttctggtgcataccgcgctaaaaatcaaatcgccaaacggcaaaagctatagcgaacggttagattcggtgcgtacagaaaagcaattgagcgcgatttttgacgatctgatcagcatggtgccaatggggcagacgctgtttggttcgctcaatccggtgcgcaccggtgggccgatgcaggtcagtattgcttttgccgaacagcataccaaagggtatccgtggaaaatggacggtacagtccgtcaggaagtcttcagtcgccgcggcgggttgtggtttggtacttaccatttactgaattatcccgccagctatagcgcgccgatataccgttttgctgattttaacgctggctggtacgccagtcgtaatgccgcgtttcagaacgcggtcagtaaggccagcggcgtgaagctggcactggacggtgatttaattcgttacgacagtaaagagcccgggaaaaccgaactggcaacgcgcaaactggcgggaaaactggggatgagcgacagcgaaattcgccgtcagttagagaaaggggacagcttctcttttgaggagacggcgctgtacaagaaagtttatcaacttgccgaagcgaaaaccggtaaatcactaccccgcgaaatgttgcctggcattcaactggaaagcccgaaaatcacccgcaatctgactacggcctggtttgcgaagcgcgtagacgaacggcgggcgcgttgtatgaaacagtgatcaaacaggaatgtcacgccagataaggcgttttaggcagcatctggcaacgtaaatcttactggcggcgatgtcgccagtgcagccatagcgccactactgcaaaaatgaggcagcctactaaaaacgggatcagcccaaaaatggtgccgacacctaaaccaatttccacccgtgggcgacctgtttcctggacctgcattaaacgctcatagacgccgggcgcatgcactagcaggttcagcaattgcgccccagcccaaaagcaaaacagcacaaacaacgcataggcaatattgccaggcgttgaagatgcattgcgatattttccgctaaacagcgattttgacagggtgaaatcagccataaaaacctccggaagtcatctgcttctcttctggtgtgataccagcggcttatggcaagtctgacaggtcatttcgattgtcaatatcagaatcatggtaaattgatgttgggaatattcccgaagcgtgaatcttcgttgtgagtcacaaaatagcaaccttaagttaaatttattaacaattgcgaaagtgttgtctacaccacagacagttgttacagaatatgcaaggatgttgtttttcgttaacggagctgccatgaatctgcctgtaaaaatccgccgtgactggcactactatgcgttcgccattggccttatattcattcttaatggcgtggtggggttactgggatttgaagcaaaaggttggcagacctatgccgtcggtctggtgacgtgggtgattagtttctggctggcggggttgattattcgtcgtcgcgatgaagaaactgaaaacgcccaataagaatattaccgggcgtttgaatattacattgtggttttcagtgcgttatccgcagcgtgacgctccagcgccagctcaatcaaacgcgtgatcaggtcggtgtaacccagaccgctggcttgccacagcttcggatacatactgatgttggtgaagccaggcagggtgttgatctcgttgatcactacttcgttctctggggttaaaaacacgtctacacgcgccatgcctgcgcatcccaacgtctgataagcctgaacggcaatcgcccggatcttatcgttgatttctggcgcaatggctgctggaactaccactttcgcgccatcttcgtcaatgtacttggtgtcgtaggcatagaaatcgctggtgagtacgatctcgccacaggtgcttgcttgcgggttatcgttgccaagaactgcgcattcgatttcacgacctttgatcccttgctcaacgatcactttatgatcgaactcgaacgccagatcgacggcaattgtgtactgttcttcactggttactttgctgacaccaacagaagagccctgattagccggttttacaaacagcggtaaccccagtttagactccacttcggcaaaactgatgttgtgacgattagcgcgcgtcagggtaataaatggcgcaatgttcagcccggcatcgcgcagcagacgtttggtgacatctttatccatacaggccgctgaagccagaacatcagaacctacaaacggtaaattggcgacccgcagcattccctgcaaggaaccatcttcgcccagcgtaccgtggacaatcgggaaaatgacatccaccgtcggcaacggctgaccgttttgtgcgtcgataagctgatgctcatgtttacctggcacctgcgcaaggctggtcgccgaaggacgcaacgcaatatgggcaggatcgtctgcatttagcagataattgctggcatcgctgacgtgccattgcccttgtttatcaatgcccagcagcacaacatcgaagcgacttttatcaatggcatcgacaatgttttttgccgattgcagagacacttcatgttccgctgatttaccaccaaaaacgattcctacccgcagtttttccatcttaaaaacctatcccgtctaacacaaagtgcatacattaccatgacaaaacgggggattcgcggccttctgacagaatgttgcaatcttctgctgacaaagcgagcaacgtactggtgaagaaagtgcgttatctcaaagatgtgtgcaagatcacaaaaatgatgaacgggaagctaatttattcctggcttaaatgaccatgtggtgagttttttctcttaattataagataacgaagagaatatatttcataacttttatttataataaaggttgataattaaaggcctgtattttatgtgggtaattatttaaataagagaaacgtttcgctggtaatcaaacaaaaaaatatttgcgcaaagtatttcctttgtcataaaaataatacttccagacactatgaagttgtgaaacataatgttaacttctccatactttggataaggaaatacagacatgaaaaatctcattgctgagttgttatttaagcttgcccaaaaagaagaagagtcgaaagaactgtgcgcgcaggtagaagctttggagattatcgtcacggcaatgcttcgcaatatggcgcaaaatgatcaacagcggttgattgatcaggtagagggggcgctgtacgaggtaaagcccgatgccagcattcctgacgacgatacggagctgctgcgcgattacgtaaagaagttattgaggcatcctcgtcagtaaaaagttaatcttttcaacagctgtcataaagttgtcacggccgagacttatagtcgctttgtttttattttttaatgtatttgtacatggagaaaataaagtgaaacaaagcactattgcactggcactcttaccgttactgtttacccctgtgacaaaagcccggacaccagaaatgcctgttctggaaaaccgggctgctcagggcgatattactgcacccggcggtgctcaccgcttaacgggtgatcagaccgccgctctgcgtgattctcttagcgataaacctgcaaaaaatattattttgctgattggcgatgggatgggggactcggaaattactgccgcacgcaattatgccgaaggtgcgggcggcttttttaaaggtatcgatgccttaccgcttaccgggcaatacactcactatgcgctgaataaaaaaaccggcaaaccggactacgtcaccgactcggctgcatcagcaaccgcctggtcaactggtgtcaaaacctataacggcgcgctgggcgtcgatattcacgaaaaagatcacccaacgattctggaaatggcaaaagccgcaggtctggcgaccggtaacgtttctaccgcagagttgcaggatgccacgcccgctgcgctggtggcgcatgtgacctcgcgcaaatgctacggtccgagtgcgaccagtgaaaaatgtccgggtaacgctctggaaaaaggcggaaaaggatcgattaccgaacagctgcttaacgcccgtgccgatgttacgcttggcggcggtgcaaaaacctttgctgaaacggcaaccgccggtgaatggcagggaaaaacgctgcgtgaacaggcacaggcgcgtggttatcagttggtgagcgatactgcctcactgaattcggtgacggaagcgaatcagcaaaaacccctattaggactgtttgctgacggcaatatgccagtgcgctggcaaggaccgaaagcaacgtaccacggtaatatagataagcccgcagtcacctgtacgcctaatccgcaacgtaatgacagtgtaccgaccctggcgcagatgaccgacaaagccattgaattgttgagtaaaaatgagaaaggctttttcctgcaagttgaaggtgcgtcaatcgataaacaggatcacgcagcgaatccttgtgggcaaattggcgagacggtcgatctcgatgaagccgtacaacgggcgctggaattcgctaaaaaggatggtaacacgttggtcatagtcaccgctgatcacgcccatgccagccagatagttgcgccggataccaaagctccgggcctcacccaggcgctaaataccaaagatggcgcagtgatggtgatgagttacgggaactccgaagaggattcacaagaacataccggcagtcagttgcgtattgcagcgtatggcccacatgccgccaatgtcgttggactgaccgaccagaccgatctcttctacaccatgaaagccgccctggggctgaaataaaaccgcgcccggcggtgaattttcgctgtcgggtggtttttttgctgttagcaaccagacttaatggcagatcacgggcgcaaacgctcatggttaaaacatgaagagggatggtgctatgaaaataacattactggttaccttgcttttcggactggtttttttaaccaccgtcggcgctgccgagagaaccttaaccccgcaacaacagcgtatgacctcctgtaatcagcaggcgacggcgcaggcgttgaaaggggatgctcgtaagacctacatgagtgattgcctgaagaacagcaagtctgcgcctggtgaaaaaagtttgacgccacagcagcaaaagatgcgcgaatgtaataatcaagcaacgcaacaatctctgaaaggtgatgatcgtaataagtttatgagcgcctgcctcaagaaagccgcctgatacctgatagtgctaacgggtgagctacgaaaatggctcacccgaaatttcatacttctgcctttagccccgtctctataatttgggaaaattgtttctgaatgttcccaaaaataatgaatgatgaaaactttttcaaaaaagcggcggcgcatggggaggaacctcctttaactcctcaaaacgaacatcagcgatccgggctgcgcttcgcccgtcgcgtcagactaccccgcgcggttggcctggctggcatgttcttaccgattgcttcaacgctggtttcgcacccgccgccgggctggtggtggctggtgttggtcggctgggcgttcgtctggccgcatttagcctggcagatagcgagcagggccgtcgatccgcttagccgggaaatttacaacttaaaaaccgatgcagtattagcgggaatgtgggtaggcgtaatgggcgtaaacgtgctgccttccaccgcgatgttgatgattatgtgtctgaatttgatgggggcaggcggcccccgtctgtttgtcgcgggtctggtgttgatggtggtttcctgccttgtcaccctcgaactgacgggcatcaccgtgtcgttcaatagtgcgccgctggaatggtggctctcccttcccattatcgtcatttatcctctgctgtttggctgggtcagctaccagacggcgactaaactggcggaacataaacgcaggttgcaggtcatgagtacccgcgacggtatgacgggcgtgtataaccgacgtcattgggaaactatgttacgcaatgaatttgataactgtcggcggcataaccgcgatgcgacattactgattatcgatatcgaccatttcaagagcatcaacgatacctggggccatgatgtgggcgatgaagcgattgtggcgcttacccgacagttacaaataaccctgcgcggtagcgatgtgattggtcggtttggcggcgatgagtttgcggtaatcatgtccggtacgccagctgagagcgccattaccgccatgttacgagtgcatgaagggctaaatacattacgtctgccgaatacgccacaggtaactttacggattagtgtgggggttgcgccgctgaacccacaaatgagtcactatcgtgagtggttgaaatcggcagatttggcgctttacaaagcaaagaaagccggacgtaaccgcaccgaagtggcggcctgacgtccggcaaaagtcatcaggatttactgagtttttctgatttttccatacacttcgtcatcgcttcgatcactgcggcacggaagcctttctcttccagtacgcgtaccgcctcaatggtggtgcctcccggtgagcagaccatatctttcagtgcccctggatgttctcccgtttccagcaccatttttgcggaacccattaccgcctgagcggcaaatttatacgcctgggcgcgtggcatcccgcccagcacggcggcgtcggccatcgcttcgataaacataaagacgtaggctggcgaagaaccgctcacaccgaccaccgggtggatcatcggctcggcaattacttccgcttcgccaaagcagcggaaaatattcagcacatcagcggtatcttctggggttaccagcgcgtttggcgttacggaggtcatcccggcattaaccagcgcgggagtgttcggcatggcgcggataattttccggtcatggcccagcgcgcgggcaagctggtcgagtgtgatacctgcagcaatagaaacgaccagagagtctttattcaggctggaggtgatttcgctaagcactttaatcatgatgccaggtttaacggcggcaaaaatgatgtcggcgatttgcgctacttcttgcgccgattctgcggcgttgatgccgaactggtcatgcagggcggcgactttatccggggagggggtatatacccagatttgccctggaagcacctgaccgctggcaatcagaccgccgagaatggcttttcccatattgccgcagccaataaaaccgattttcttttccattgcctcactcctgccgtgaaattcattgttttgataatcgctggcagaagcataaacagaactatgccggaaggcaaaagcgcgacacaatagaggattacccaacaaaggatgactttatgacaatttgggtggatgccgacgcgtgtcccaatgtaattaaagagattttgtatcgcgcggcggaacgtatgcagatgccgctggtactggtagcaaaccagagtttacgcgtgccgccatcgcgatttattcgtacgctgcgcgtcgcggcaggtttcgacgttgccgataacgaaattgtccggcagtgtgaagcgggcgatttggtgatcaccgcagatatacctttggctgctgaagccatcgagaaaggcgcggcggcgcttaatcctcgcggcgaacgttacacgccagcgaccattcgtgagcgcctgacgatgcgcgattttatggataccttacgtgccagtgggatccagaccggaggaccagatagtctttcacaacgtgaccgccaggcctttgctgcggagctggagaagtggtggctggaagtgcaacgtagtcgtggctaaatgtaatttattatttacacttcattcttgaatatttattggtatagtaagggatgtattgagattttcactttaagtggaattttttctttacaatcgaaattgtactagtttgatggtatgatcgctattctcatgacaccggctttcgccgcattgcgaccttttggggaaaacccacgatgacacaacctctttttctgatcgggcctcggggctgtggtaaaacaacggtcggaatggcccttgccgattcgcttaaccgtcggtttgtcgataccgaccagtggttgcaatcacagctcaatatgacggtcgcggagatcgtcgaaagggaagagtgggcgggattccgcgccagagaaacggcggcactggaagcggtaactgcgccatccaccgttatcgccacgggcggcggcattattctgacggaatttaatcgtcacttcatgcaaaataacgggatcgtggtttatttgtgtgcgccagtatcagtcctggttaaccgactgcaagctgcaccggaagaagatttacggccaaccttaacgggaaaaccactgagcgaagaagttcaggaagtgctggaagaacgcgatgcgctatatcgcgaagttgcgcatattatcatcgacgcaacaaacgaacccagccaggtgatttctgaaattcgcagcgctctggcacagacgatcaattgttgattttcgagcgcctatacttaacgttcatcccgtgaaataaggaagaacgatgccaacgaaaccgccttatcctcgtgaagcatatatagtgacgattgaaaaaggaaagccaggacagacggtaacctggtaccaactcagagccgatcatcctaaaccagactcgttgatcagtgaacatccgaccgctcaggaagcgatggatgcgaaaaaacgctatgaggaccctgacaaagagtgaccgcatcagactgctcggaagggattctgagtgccgccacaagggatctgcgtcacatttttcacaattcatgtttttcaaataattagaatattaaacaataacaatccattactggaatcatttggaatctttacattatgcagtgcaggtctgctgctacgctttttgtcatttgtagcacaagtaagtgtcagcagtggtgcttaacacttgcccggtaattaacgacgaaataaaagtaaggtggaagaacaatgagtgcgtcgttggcgatcctgactatcggcattgtacctatgcaggaagttttgccgctcctgacagaatacattgacgaagataatatttcccatcatagcctgctggggaagttaagccgcgaagaagtgatggcggagtacgcgccagaagcaggcgaagacacaattctcacattattaaatgacaaccatctggcccatgtttcgcgtcgcaaagtggagcgagacctgcaaggtgtggttgaagtgctcgataatcagggttacgacgtcattatattaatgagtacagcaaacattagtagtatgaccgcgcgtaatacgatctttcttgagccgtcgcggatattgccaccgctggtttcctctattgttgaagatcatcaggtgggggttatcgtaccggttgaggagttgctgaccgttcaggcgcaaaaatggcaaattttgcagaaaccgccagtattttcattgggtaaccccattcatgattcggaacaaaaaatcattgatgccgggaaagaattactggcaaaaggtgcagatgtcatcatgctggattgtttgggatttaaccagcgtcatcgcgatttactgcaaaaacagctcgatgttcctgtcttgctctctaacgtattgattgcacggctggctgcggaattactgatgtaattttgcgtgacagccagcgcctctggcccctatagtgaagtagatgttcaactaccagacagggccagtttatgcttcaaagtaatgagtacttttccggcaaagtgaaatcgatcggcttttccagcagcagcactggtcgcgccagcgtgggtgttatggttgaaggtgaatacaccttcagcaccgctgagcctgaagagatgacggtaatcagtggcgcgctgaatgtgttactgcctgacgcgaccgactggcaagtgtatgaagccggttcggtgtttaatgttcccggtcacagcgagtttcatctgcaagttgccgaacccacctcttatctgtgccgctatctgtaattcctcgccttccccttgaacgggagggcatttttctgaaatgtcctctctttaacccataataatatttcctttgctgggattttttcgatttccgatatattcataattcatcaaggttgatataaatatcagcgaagatctccagatattgttgcggaactggcgacgataaaagataaatcagatgatgaatggtggcgtgcattgctgcaaagtcgcaatgatcatttgcgccaaacggcattgcacaacgcacataccccggtgttgttgttaacgacattgactgagcctcaggagcggtcgctggctattaataattcacagctggctgccgatgtgaaaacggcgtggttaaaagaggagccatcattactcttatttgtcgaacaacccgatctttcgctgttacgtgatttagtgaaaaccggggcaacgcggaaaattcgcagtgaagcgcgtcaccggcttgaggaaaaacaatgacacaacgcccctggagcaagttacagcataaaacgcataatattgctgcgctaagaattattgcccgctgtagctaacgattatattcctggtgtggcttcgtacgccggataagacgcggcaggcgtcgcatccggcattaaaggtaaatcagcaattaacgttgtgcttcgccacctaatccttcaatcaggttttgaattaacgctgccagttcaccagtcatcaggatgaaatcggcatcaaaacgctgggcgaaatcttcacggtcgatatcttcgttttgatcgcgcagctcgtcgcagaacttcagacgcttgagcgaaccatcgtcgcacatcacaaactgaatgcgctgctgccagtcgagcgccagtttagtcaccacttttccggcttcaatgtggttggtgatctcttcgctggtcagatcttgtttcttcgcgcggatcacgccgccatcttccagcaacgatttcagctcggcttcatcaagcagctggaagccctgtgccgtgctgccggaacgtacccattcggtcagcgtcagttcaatcgggttttccatgctcaatggtacaaccggtaacgaccccaggcttttacgcaacagtgccagcgtatcttccgcttttttggcgctggcgcagtccaccataatcaaaccgttaaccgtgtcgatccacatcattgtctggctaaaacggctgaaagcacgcggcagcagagagtgcagcacttcgtctttcagcgaatctttttcggttttcttcagcttacgcgcctgttctgcttccagtttggcgattttcgcttccagcgcctgtttaatcaccggggacgggaggattttttcttctttgcgcgcacagataacaatttgaccattggcaacgtgcgttaacgcatcgctgtgcgatcccatcggaggtacccagcccatcttcgccatgtcctggctgccgcatggggtaaatgccatcgaggctagctgtttttccatctcttctgcacgcagcgaaatctcgcggctaagacggtaaaccattaaatttttgaaccacagcatgataatttccacggccttgtcgttaaatttagcgggcatgataacgaattgtcggcggccttgcattgccaatccggttgtccgtctctacgctattgatattgaaaaaaataaggagagtaccgtgcgtataggtatcgatttaggcggcaccaaaactgaagtgattgcattgggcgatgcaggggagcagttgtaccgccatcgtctgcccacgccgcgtgatgattaccggcagactattgaaacgatcgccacgttggttgatatggcggagcaggcaacagggcagcgcggaacggtaggtatgggcattcctggttcgatttcgccctacaccggcgtggtgaagaatgccaattcaacctggctcaacggtcagccattcgataaagacttaagcgcgcggttgcagcgggaagtgcggctggcaaatgacgccaactgtctggcggtttcagaagcggtagatggcgcggcagcgggagcgcagacggtatttgccgtgattatcggcacgggatgcggcgcgggcgtggcattcaatgggcgggcgcatatcggcggcaatggcacggcaggcgagtggggacacaatccgctaccgtggatggacgaagacgaactgcgttatcgcgaggaagtcccttgttattgcggtaaacaaggttgtattgaaacctttatttcaggcacgggattcgcgacggattatcgtcgtttgagcggacatgcgctgaaaggcagtgaaattatccgcctggttgaagaaagcgatccggtagcggaactggcattgcgtcgctacgagctgcggctggcaaaatcgctggcacatgtcgtgaatattctcgatccggatgtgattgtcctgggcggcggaatgagcaatgtagaccgtttatatcaaacggttccacagttgattaaacaatttgtcttcggcggagaatgtgaaacgccggtacgcaaggcgaaacatggtgattcgagcggcgtacgcggcgctgcatggttatggccacaagagtaaaaaaaccaggcaattggcgtatcatgcctgatgcgacgcttgccgcgtcttatcaggcctacaaagtgagccgtccggtaggccggataaggcgctcgcgccgcatccggcaacaaataacgcgcacagtggcggcaaccccccggtgctccgatgcctgatgcgacactggcgtgtcttatcaggcctacaaaatgaacagtcccgtaggccggataaggtgttcacgccgcatccggcaataagcaacgtgcaccgtggctgcaatctaccccactggtttcgccagcaccggactatccgccgcttgctggcgcttatagcgaccatacagcagcaacgacgacatcgcagcaaacgaaagcagggcggcaggtagcgccacgtaattatatgccagccccagcgtcagcatcataccaccgcaatatgcgccgacggcgctaccgaggttaaacgctatttgcccacctgcggcacctaataactctccgcctttggcattttgcagtaacaatatttgcagtggtgctgaaagggcaaataatcccgcgcaacaaataaatgcaaaaataagcgacgttgttttcatgccgccgaagaaaaagagcatcagcagtgccagcacaataataaagtcagttactgccgcaatgcgcagtggtgaataacgtcctgaaatccggccacttagcacattccccagcaccatccctagccccactaacatcataataaaggtcattgccgtttccgaaaaaccggaaataaacatcatgtatggctttacgtagctgaaccaggcaaatacacctgcgttgccaaacatggtggcggcgaaaattaaccacggggcagggctgcgtaaaaagtgaaattgttcgcgtagttttcctttcgcctcgtcgcgaatatccggcacccaaaaatagaccgatgccatcaccgcaatattaaaaacagcgatcaacaaaaaggtgtaacgccaactaaattcctgacttaaatacgttcccagtggaatgcccagcaaattggcgactgtcatcccggaaaccatccctgccacggcggcggtgactttgccgggtttgataatttttgataacacgatcgcgccgacgccaaaaaatgcaccatgcggaaagccggaaaccagccgaccaatggcgagcatcaggtaagacgaagagagcgtgaacatggcgttgccaatgacgcacaacgccaccagaaacaacaagatatgtttgagtgagtagcggctggaaaaaagcgcgattataggcgcaccgaccaccacccccagcgcataatacgagatcatatgcccggcggcaggaatcgaaattcctacgttatgcgccagctccgtgagcacgcccataatgccaaattcggccatccccaaaccaaacgtgcccagagccaaagataaaataacttttttcataccaccatcacaaccaccagaacggctaccaatcaccgtagccaataaagtgatagattgcaggataacgaccagcgaggccaagagataattcgcccctctgtattcattatcctgctgaatagttatttcattgcaaacgcactttccagtttgctgtagcccagtccattgatcttcttcactttgatctgcaccggaatacgctctttcatcgcctcaacgtggctaatcaccccgatggttttgccactggcattcagggcatccagcgcatcaagggcggtatccagcgtttcgctatccagtgtgccaaaaccttcatcaaggaacagcgagtcaatacgcgttttatggctgaccagatctgaaagcgccagtgccagcgccagactgacgaggaaactttcgccgccggaaagggtacgggtatcgcgtaccgcatcagcctgccaggtatcaacaacctcaacttccagcgcttcgctggctttgcgctgtaacagatagcgcccgtgcagccgggtaagttgctgattagcgagatggactaaattatccagcgtcagcccttgggcaaacttgcggaatttatcgccctctttggaacctattagcgaattcagatatccccagtcctcaacctgctgcgtcatttgagcaatttgctgcattaaggtttgttgttgctgacggttatctgcatcctgcttcagctgctggcgaatctcgccttgactcgtggtgttttcacgcaacttttggtgagtttgcgctaactcttgctgaatctgctccaccgtcacagtgagagataacccgccaggtcggtgttgctgatgctgtgtcagcgtttctgctgtctgagtgaccagcgtttgcgcctgacggcgctggttttccagattctgcttgagctgttccagctgcgttagtgtttgttcatccattagcgccgcaaggaacgcctgctgatcgtcaaagacgctcgcctgtagcgcggtgtcaaactgcgcctgggctttttgcagactttgcgccgccagaacatcctgttgctgtaacgtctgctgctggctgtgtaatgcgagacattgttcatgaacctgccgccagttttccagcaccacagtttcttcgctgtgcgggagttcatcactttgcggcaacgtttccagaatcggcgtcagttgctgaatacggttttgcagcgcggttaattcgttctggcgatgctgccagctctgcgcttcttgctgacgcgtcgccaaccagctctcttcttcatcttcctgtggcaatgtcagtgcataacccgccaatgccgttaagagctgctgctggcgttgttcaatttgctgttgatactggataatttgctgattatgcgcggcaatctgcccttgtaattcatgccgttggctgagtaaccgcagctggcgttcgtgctcatcttgtgcatctagccacggttgaatatcgtcctgtggctgcaaggtgatattgaggctggccgtgacggcttgccattgttgagtaagtgcttgctcatcttgtcggaggctttgcgcttcgttttcatcacgctgaagttgctttgttaaggcgtccagttgcccacgtagcgtcgcaccttcttcaccgagctttttaacttcgttttccagcgccagtaatcgagactgattaacgccaggctccagcgcctgatacgcctcgaccgccgggtggctggtggaaccacaaagtggacaaggctgacccgcctgtaactgtgcacgttgagcttccagcgttttgatgcgcgcttcctgctcgcaaatggttttcacatcggcaagttgctgcgtcttttctttataacgctggcgcatttcgttaagtgcggcgttacgttgcgtctgttcttgcgtgacattctggatagtgacctgtaattgcgccaggcgtttttgttggggaacaatctgtccatgcagcgcgaccaggcgctgacgcagcgtgcgttgctcagcatgttgcgccagggcgctagcaacttcatcggcggttaacgtcaacgtaatcgccgcaagcgcattaagtttttgctctgcatgggttaactgttgctgccattgccgcagatgctcgcgatcgctggtttgttgggagaactgcgcacgccaacccgccagttcgttgttccactgacggaagcggtcgtgttcctgtagccaggcattcagactttgttgctgctgctgtaattctgctgactgcttcgccgcgtggtggcgaatgctcgcccgaagcgccattgtgctctgtaagcgagtatttacttcttcaatctgctggcgagtatgcgccagcgccgcgctgtgttctgcgatgcgttcccagtgtggacgaagatttcgtgccggttgtgccagactgagcgccgccagttgaggttgcgctttttcttcttcggctaacgcctgttgcaatgcctgttgacggcggctggcttcttgctgcaattcgtccagacgcgttaaccagtttagtgattgttgttcttgctgctgcgcggtaagtaactgtttttcttcgtcagtaagtacctgcaaactcgctgtcagcgattgcacttgttctggcgtgagcaacgcgacgccgctggcctgcgcttgcagcttctccagctctgtgcgggccgatttgtgctgctcaaaaaccatcgccgagattttcccgtagatttcagtgccggttaactcctcgagcaattccgcgcgttctttgggtttggcattcaggaaggcagcaaattgcccctgcgaaagcagcatcgaacgggtgaagcgcccgtaatccagtccggttaacgtcgccgtcagttccagcttatctttcactttgtcggcgagaattttgccgtctgcgcagcgcgccagctctacgcgtggcacctgcaaattaccgtccggctggttacgcgcccgattctggctccagaacgcgcgatacgcttcacctttgacttcaaaccccacttccgccagacattcggcggtatcgcgagtcatgagatcattttgcgattgtgaaacgttagagaggcgcggggtttcgtgatacagcgccagacaaatggcgtccagcagggtggttttccccgcaccggttgggccggtaatagcaaacagcccgttgctggcgaacggctcgcgggtgaaatcaatcttccattcgccttttaatgagttcaggtttttcaggcgcaggctgagaattttcatgcttcgtgttctccggcgaggctatgcaatgtcgtggcgaaaagatgctgcagacgttgctgctgcgattcatccagttcttccagtgccagacggcgattgaacacctcttcgacgctgagttcgctgagggtttcacgctgttggctggctaacacacgctcgcgctgttcacgactccggcgtaccagcaatacttcgacaggcaatgattcggttaatgcctggattttgcgctgaatatcatgcagatactcatcagtagtgatttcgatatccagccagacaggcggctccagtgatacatcgcgccactgttccagctgtgcggtaatcgacgccagatcgcctttcagcaccgccatgggttgcgttaccggtacgttcaggttttccacgctctctaatttgccgtttgaaaatgtcaccagatggacatatttactcttaccgcattcatcaaaactcagtggaatgggggaaccgcaatagcgaacatgttccatgccgccaataatctgcgcgcggtgaatatgcccgagcgcgatgtagtcggctggtggaaagttttgtgccggaaacgcgtccagcgtgccaatataaatgtcacgcacggcgtcacttttactggcacccacggtcgttaaatgtccagtggcgatgatgggcagaggctgatcgccgcgcagtttgcaggcatcggcatagtgttgttgataataatcagtaatagccgccagcaaatgctgctgtttttcaataccgttaagccccgcctggctggtaataatgtcacgcgggcgtaaaaaaggtatgggacacagcactgcgcctggcgtcccgtcgcgacgaggcaagatttgcggcgtatgtccggcgctggcgaccacggtagtattgaggaacgccatgatatcgcgcgattcattcagcgtggcgaccgagtcatggtttcctgccagtaccaccagatgacagccagtttgctgtaaattgacaacaaaacggttatataaagtacgggcgtaactgggcggcgagccggtatcgaaaacatcaccggcaacaataatcgcatccacctgatgggcttgtgctgtctccagcagccagtcaagaaaagcctgatgttcagcttcgcggcttttactgtagaagttctggccgagatgccagtctgaggtgtgaaggatgcgcataacggttccctggcgaaaaagcatgggcgcgattatacccaaacagatgtgccatttgcttttttctgtgccacggaaatcaataacctgaagatatgtgcgacgagcttttcataaatctgtcataaatctgacgcataatgacgtcgcattaatgatcgcaacctatctattacaacagggcaaatcatggcgagacgtattctggtcgtagaagatgaagctccaattcgcgaaatggtctgcttcgtgctcgaacaaaatggctttcagccggtcgaagcggaagattatgacagtgctgtgaatcaactgaatgaaccctggccggatttaattctccttgactggatgttacctggcggctccggtatccagttcatcaaacacctcaagcgcgagtcgatgacccgggatatcccagtggtaatgttgaccgccagaggggaagaagaagatcgcgtgcgcggccttgaaaccggtgcggatgactatatcaccaagccgttttctccgaaggagctggtggcgcgaatcaaagcggtaatgcgccgtatttcgccaatggcggtggaagaggtgatcgagatgcaggggctaagtctggacccgacatctcaccgggtgatggcgggcgaagaaccgctggagatggggccgacagaatttaaactgctgcacttttttatgacgcatcctgagcgcgtgtacagccgcgagcagctgttaaaccacgtctggggaaccaacgtgtatgtggaagatcgtacggtcgatgtccacattcgtcgcctgcgtaaagcactggagcccggcgggcatgaccgcatggtgcagaccgtgcgcggtacagggtatcgtttttcaacccgcttttaaggccttgctcatcggacgtagagcagggcttatgatttcttaactggagtatcttacgtgctggaacggctgtcgtggaaaaggctggtgctggagctgctactttgctgcctcccggctttcatcctgggtgcattttttggttacctgccctggtttttgctggcatcggtaacaggactgcttatctggcatttctggaatttattgcgcctttcatggtggctgtgggtggatcgtagtatgaccccgccaccggggcgtggtagctgggaaccgctactatacggcttacaccagatgcagctgcgaaataaaaaacgccgccgtgaactgggcaatctgattaaacgctttcgtagcggcgcggagtcgctgcccgacgcggtggtgctgaccacggaagagggcggtattttctggtgcaacggtctggcgcaacagattcttggcttgcgctggccggaagataacgggcagaacatccttaacttgctgcgttacccggagtttacgcaatatctgaaaacgcgtgatttctctcgcccgctcaatctggtgctcaacaccgggcggcatctggagattcgcgtcatgccttatacccacaaacagttgctgatggtggcgcgagatgtcacgcaaatgcatcaactggaaggggcgcggcgtaacttttttgccaacgtgagccatgagttacgtacgccattgaccgtgttacagggttacctggagatgatggatgagcaaccgctggaaggcgcggtacgtgaaaaagcgttgcacaccatgcgcgagcagacccagcggatggaagggttggtgaagcaattgctgacgctgtcgaaaatagaagccgcaccgacgcatttgctcaatgaaaaggttgatgtgccgatgatgctgcgcgtcgttgagcgcgaggctcagactctgagtcagaaaaaacagacatttacctttgagatagataacggcctcaaggtgtcaggcaacgaagatcagctacgcagtgcgatttcgaacctggtctataacgccgtgaatcatacgccggaaggcacgcatatcaccgtacgctggcagcgagtgccgcacggtgccgaatttagtgttgaagataacggaccgggcattgcaccggagcatattccgcgcctgaccgagcgtttttatcgcgttgataaagcgcgttcccggcaaaccggtggtagcggattagggttagcgatcgtgaaacatgcggtgaatcatcacgaaagtcgcctgaatattgagagtacagtaggaaaaggtacacgtttcagttttgttatcccggaacgtttaattgccaaaaacagcgattaattcgcctttgtcatcttttattgccataagccagccgatgctggcttattttctttgcagtcgaaatacgggcgttagattttacaacggttggtgattttttgttcgcatgattagccatgtctttttcattgaaatagtgttttatactggttggtgatttcttatcgctatatacctctggtttttagatcccttcttgctttaaaacgttataagcgtttaaattgcgcttcaggtgctgtcatactgactgcatttacgcggtaaatcgaaaaactattcttcgccgcgcctggttgggagtatttcccgctaaaattgtttaaatataccgctgtatcatccccagggattggcacaaaaatttaacgttacaacaccacatccacaggcagtatgatttatgacccatcaattaagatcgcgcgatatcatcgctctgggctttatgacatttgcgttgttcgtcggcgcaggtaacattattttccctccaatggtcggcttgcaggcaggcgaacacgtctggactgcggcattcggcttcctcattactgccgttggcctaccggtattaacggtagtggcgctggcaaaagttggcggcggtgttgacagtctcagcacgccaattggtaaagtcgctggcgtactgctggcaacagtttgttacctggcggtggggccgctttttgctacgccgcgtacagctaccgtttcttttgaagtgggcattgcgccgctgacgggtgattccgcgctgccgctgtttatttacagcctggtctatttcgctatcgttattctggtttcgctctatccgggcaagctgctggataccgtgggcaacttccttgcgccgctgaaaattatcgcgctggtcatcctgtctgttgccgcaattatctggccggcgggttctatcagtacggcgactgaggcttatcaaaacgctgcgttttctaacggcttcgtcaacggctatctgaccatggatacgctgggcgcaatggtgtttggtatcgttattgttaacgcggcgcgttctcgtggcgttaccgaagcgcgtctgctgacccgttataccgtctgggctggcctgatggcgggtgttggtctgactctgctgtacctggcgctgttccgtctgggttcagacagcgcgtcgctggtcgatcagtctgcaaacggtgcggcgatcctgcatgcttacgttcagcatacctttggcggcggcggtagcttcctgctggcggcgttaatcttcatcgcctgcctggtcacggcggttggcctgacctgtgcttgtgcagaattcttcgcccagtacgtaccgctctcttatcgtacgctggtgtttatcctcggcggcttctcgatggtggtgtctaacctcggcttgagccagctgattcagatctctgtaccggtgctgaccgccatttatccgccgtgtatcgcactggttgtattaagttttacacgctcatggtggcataattcgtcccgcgtgattgctccgccgatgtttatcagcctgctttttggtattctcgacgggatcaaggcatctgcattcagcgatatcttaccgtcctgggcgcagcgtttaccgctggccgaacaaggtctggcgtggttaatgccaacagtggtgatggtggttctggccattatctgggatcgtgcggcaggtcgtcaggtgacctccagcgctcactaaatcactgaacatttgttttaaccacggggctgcgatgccccgtggttttttattgtgttgatgggttaggaattgatggaaagtaagaacaagctaaagcgtgggctaagtacccgacacatacgctttatggcactgggttcagcaattggcaccgggctgttttacggttcggcagatgccatcaaaatggccggtccaagcgtgttgttggcctatattatcggtggtatcgcggcgtatatcattatgcgtgcgctgggggaaatgtcggtacataacccggcagccagctctttctcgcgttatgcgcaggaaaacctcggcccgctggcaggttacattaccggctggacctactgctttgaaatccttattgtcgccatcgccgatgtgaccgcttttggtatctatatgggtgtctggttcccgacggtgccgcactggatttgggtactgagtgtggtgctgatcatttgcgccgtaaacctgatgagcgtgaaggtattcggtgagctggagttctggttctcgttctttaaagtcgccactatcatcatcatgattgtcgccggtttcggcatcatcatctgggggattggcaacggcgggcaaccgaccggtattcataacctgtggagcaacggcggcttcttcagtaacggctggcttggtatggtgatgtcgttgcaaatggtgatgtttgcttacggtgggatcgaaattatcgggattaccgccggtgaagcgaaagatcctgagaaatcgattccgcgtgcgattaactccgtgccgatgcgtattctggtgttctacgtcggtacgctgttcgtcattatgtctatctacccgtggaatcaggttggcactgccggtagcccgtttgtgctgacgttccagcatatgggcattacctttgccgccagcattcttaactttgttgtgctgaccgcttcgctgtcggcaattaacagtgacgtatttggtgtaggccgtatgctccacggtatggcagagcagggcagcgcgccaaaaattttcagcaaaacctcgcgtcgcggtattccgtgggttacggtgctggtgatgactaccgcgctgctgtttgcggtgtatctgaactacatcatgccggaaaacgtcttcctggtgatcgcttcgctggcaaccttcgccacggtgtgggtgtggattatgatcctgctgtcgcaaatcgccttccgtcgccgtttgccgccagaagaagttaaggcgctgaaatttaaagtgccgggtggggtcgcaaccaccatcggcggtttgattttcctgctctttattatcgggttgattggttatcaccctgatacgcgtatctcgctgtatgttggtttcgcgtggattgttgtgctgttgattggctggatgtttaagcgccgccacgatcgtcagctggctgaaaaccagtaatccttgcgttctgtaagccggttcaggaggaaatcctgatccggctattccgaaagttatccgcccccgtcctcctcccccaaatatccttcagatgatgagtgatcctgcattaggctatggcaaggtgatcagattttcatcacaggggaattatgatgttaaatgcatggcatctgccggtgcccccatttgttaaacaaagcaaagatcaactgctcattacactgtggctgacgggcgaagacccaccgcagcgcattatgctgcgtacagaacacgataacgaagaaatgtcagtaccgatgcataagcagcgcagtcagccgcagcctggcgtcaccgcatggcgggcggcgatcgatctctccagcggacaacctcggcggcgttatagtttcaaattgctgtggcacgatcgccagcgttggtttacaccgcaaggcttcagccgaatgccgccggcacgactggagcagtttgccatcgatgtaccggatatcggcccacaatgggctgcggatcagattttttatcagatcttccctgatcgtttcgcccgtaatcttcctcgtgaagctgaacaggatcatgtctattaccatcacgcagccggacaagagatcatattgcgtgactgggatgaaccggtcacggcgcaggctggcggagcaacgttctatggcggcgatctggacgggataagtgaaaaactgccgtatctgaaaaaacttggcgtgacggcgctgtatctcaatccggtgtttaaagctcccagcgtgcataaatacgataccgaggattatcgccatgtcgatccgcagtttggcggtgatggggcgttgctgcgtttgcgacacaatacgcagcagctgggaatacgactggtgctggacggcgtgtttaaccacagtggcgattcccatgcctggtttgacaggcacaatcgtggcacggggggagcttgtcgcaaccccgaatcactctggcgtgactggtactcgtttagtgatgatggcacggcgctcgactggctgggctatgccagcttgccgaagctggattatcagtcggaaagtctggtgaatgaaatttatcgcggggaagacagtattgtccgccactggctgaaagcgccgtggaatatggatggctggcggctggatgtggtgcatatgctgggggaagcgggtggggcgcgcaataatttgcagcacgttgccgggatcaccgaagcggcgaaagaaacccagccggatgcgtatattgtcggcgaacattttggcgatgcacggcaatggttacaggccgatgtggaagatgccgccatgaactatcgcggcttcacattcccgttgtggggatttcttgccaacaccgatatctcttacgatccgcagcaaattgacgcccaaacctgtatggcctggatggataattaccgcgcagggctttctcatcaacaacaattacgtatgtttaatcagctcgacagccacgatactgcgcgatttaaaacgctgctcggtcgggatgttgcgcgcctgcccctggcggtggtctggctgttcacctggcctggtgtaccgtgcatttattacggtgatgaagtgggactggatggcaaaaacgatccgttttgccgtaagccgttcccctggcaggtggaaaagcaggattcggcgttattcgcgctgtaccagcgaatgattgcgctgcgtaagaaaggtcaggcgttgcgtcgtggcggctgtcaggtgctgtatgcggaagataacgtggtggtatttgtccgcgtgctgaatcagcagcgtgtactggtggcaatcaaccgtggcgaagcctgtgaagtggtgctacccgcgtcaccgttgcttaatgtcgcgcaatggcaacgcaaagaaggtcacgggcaactgacggacgggattctggctttgcctgccatttcggctacggtgtggatgaattaacgtcttataacgccttgcgtgacgcctgctccatcatccgcggataaaactgccagaagcgggtttcgagagcatcgtaatgggcgtctaaatcgtaccaggagtcacgcagggcatccagacgtgggcgacggcttgccatgccgtttaacacgctctggatgaaatccatatcgcgatagcgcaccaaccactgctctgaccataagtagttgttcagattgataaagcgttgcggtgagtctggaagaatagtcatcacttgctcccgggcataacaggtaaattcctgtagcggaaaatcgggcgacagctgcgaccagtggcgggacagaaagtgatcccacatcacatccagcgtaataggcgcgacacggcgcgtttcattacgaaaccactcccgcgcttcgcggacttctggcagattgtcggttaatacgtcgattcgccgatgcatatgaatgccagccacgacgtcgggcggaaaactttcttcaggatttccgcgtacgaaatcagccagtaaattgccggaaagcgagctttccgcgagatgggctaaatgcaggtgagctaaaaaattcatatacacttcatccttcaaactgcctcttcgttggctgccttcactcaccccagtcacttacttaatgtaagctcctggggactcattcagttgccatctcgatgcatcttgaatgattttgtgtatagattatgtcatccatcaaggagggtaaaggttgcagggagagcgccccggcactagactacccgcctcttattttagtctgagtcagtgtcatgcgcgttaccgatttctcttttgaattgcccgaatccctgattgcccactatcccatgcctgaacgcagtagctgtcgtttactgtcgctggacgggccgacgggcgcgctgacgcacggtactttcaccgatttactcgataagctcaaccccggcgatcttctggtttttaataatacccgcgtgatcccggcgcgtctgtttgggcgtaaagccagcggcggcaagattgaagtgctggttgagcggatgctcgacgacaaacgcattcttgcgcatattcgcgcctcgaaagcgccaaaacctggcgcagaactgctgctgggcgatgacgaaagtattaacgcaacaatgaccgcgcgccacggcgcactgtttgaagtcgaatttaatgatcaacgttcggtgctggatattctcaacagcatcggccatatgccgctgccgccgtacatcgaccgtccggacgaagatgcagaccgcgaactttatcaaacggtttatagcgaaaaacccggcgcggtagcagcaccgaccgccggactgcactttgacgaacctttgctggaaaaattacgcgccaaaggcgtggagatggcgtttgtgacgttgcacgttggtgcgggcaccttccagccggtgcgcgtcgacaccattgaagatcacatcatgcactcggaatacgctgaagtgccgcaggatgtggtagacgcggtattggcggcgaaagcgcgcggtaaccgggtgattgcggttggtaccacctcagtacgttcgctggaaagtgcggctcaggcagcgaaaaacgatctcattgaaccgttatttgacgatacccaaatctttatctatccgggcttccagtacaaagtggtcgatgcgctggtgacgaacttccaccttccggaatcgacgctgattatgctggtttcggcatttgctggttatcaacacaccatgaatgcctataaagcggcggtagaagagaaatatcgcttttttagttacggtgatgcgatgtttatcacgtacaatccgcaggcaattaatgagcgcgttggggagtaattccgcggcgctggtttaaacgttggactgtttttctgacgtagtggagaaaaaatgaaatttgaactggacaccaccgacggtcgcgcacgccgtggccgcctggtctttgatcgtggcgtagtggaaacgccttgttttatgcctgttggcacttacggcaccgtaaaagggatgacgccggaagaagttgaagccactggcgcgcaaattatcctcggcaacaccttccacctgtggctgcgcccgggccaggaaatcatgaaactgcacggcgatctgcacgattttatgcagtggaaaggaccaatccttaccgactccggcggcttccaggtcttcagccttggtgatattcgtaaaatcaccgaacagggcgttcacttccgcaacccgatcaacggcgacccgattttcctcgacccggaaaagtcgatggagattcagtacgatcttggttcggatatcgtcatgatctttgatgagtgtacgccgtatcctgctgactgggattacgcaaaacgctccatggagatgtctctgcgttgggcgaagcgtagccgtgagcgttttgacagtctcggaaacaaaaatgcgctgtttggtatcattcagggcagtgtttacgaagatttacgtgatatttctgttaaaggtctggtagatatcggttttgatggctacgctgtcggcggtctggctgtgggtgagccgaaagcagatatgcaccgtattctggagcatgtatgcccgcaaattccggcagacaaaccgcgttacctgatgggcgttggtaaaccagaagacctggttgagggcgtacgtcgcggtatcgatatgtttgactgcgtaatgccaacccgcaacgcccgaaatggtcatttgttcgtgaccgatggcgtggtgaaaatccgcaatgcgaagtataagagcgatactggcccactcgatcctgagtgtgattgctacacctgtcgcaattattcacgcgcttacttgcatcatctcgaccgttgcaacgaaatattaggcgcgcgactcaacaccattcataaccttcgttactaccagcgtttgatggcgggtttacgcaaggctattgaagagggtaaattagagagcttcgtaactgatttttaccagcgtcaggggcgagaagtaccacctttgaacgttgattaatattaataatgagggaaatttaatgagcttttttatttctgatgcggtagcggcaacgggtgcaccggcgcaaggtagcccgatgtctttgattttgatgctggtggtattcggtctgattttctatttcatgatcctgcgtccacagcagaagcgcaccaaagaacacaaaaagctgatggactccatcgctaaaggtgatgaagtgctgacgaacggtggcctggtcggtcgcgtaaccaaagtagcggaaaacggctacattgctatcgcactgaatgacaccactgaagtagttattaaacgtgacttcgtagctgccgttctgccgaaaggcaccatgaaggcgctgtaattaaaatttttccctaagggaattgccgtgttaaaccgttatcctttgtggaagtacgtcatgctgatcgtggtgattgtcatcggtctgctgtatgcgcttcccaacctgtttggtgaggatccggctgttcagatcactggtgcgcgcggagtcgccgccagtgagcaaacgctgatccaggtccagaaaacgttacaagaagaaaaaataactgctaagtctgtggcactggaagagggcgctattcttgcgcgcttcgactccactgacacccagctgcgcgctcgtgaagcattaatgggcgttatgggtgacaaatacgtcgtggcgcttaatcttgccccggcaacgccgcgctggctggcagccattcatgctgagccgatgaagctcggccttgacctgcgtggcggcgttcacttcctgatggaagtggatatggacaccgcgcttggcaaactccaggaacaaaatatcgatagcctgcgcagcgacctgcgtgaaaagggcatcccgtataccaccgttcgtaaagaaaacaactacggcctgagcatcactttccgcgatgctaaagctcgtgatgaagccattgcgtatctgagcaagcgccatccggacctggtgattagcagccagggcagcaaccagctgcgtgcggtaatgagcgatgctcgtctgagtgaagcgcgtgaatatgcggtgcagcagaacatcaatatcctgcgtaaccgtgtaaaccaacttggcgtggcggagccggtggttcagcgtcagggtgctgaccgtatcgttgttgaactgccaggtattcaggacactgcgcgtgcgaaagagattctgggtgcgacggcaacgctggaattccgtctggtaaacaccaacgttgatcaggccgctgcggcatccggtcgcgtaccgggcgactctgaagtgaaacagacccgcgaaggtcagccggttgtgctgtacaaacgcgtaattctgaccggtgaccatatcaccgactccacttccagccaggacgaatacaaccagccgcaggttaacatctcgctcgatagcgcgggtggtaacatcatgtctaacttcaccaaggacaacatcggcaaaccgatggcaactctgtttgtggagtacaaagacagcggtaagaaagatgcaaacggtcgtgcggttctggtgaaacaggaagaggtgattaacatcgccaacatccagtctcgtctgggtaacagcttccgtattactggcatcaataacccaagcgaagcgcgtcagctttcactgctgctgcgtgccggtgcgttgatcgcgccgattcagattgttgaagaacgtaccattggcccaaccctgggtatgcagaacattgagcaggggctggaggcttgccttgccggtctgctggtttctattctgttcatgatcatcttctataagaagtttggtctgattgcgaccagtgctctgattgccaacttgatcttgattgtcggtattatgtcgctgttgccaggcgcaacgctgagtatgccaggtatcgcgggtatcgtcttaacccttgcggtagcggtcgatgcgaacgtactgatcaacgaacgtattaaagaagagttgagcaacggacgtactgttcaacaggcaattgatgaaggttatcgtggcgcattcagttccatcttcgatgcgaacatcaccacgctgattaaagtcatcatcctgtaggtgaaaatccgcaatgcgaagtataagagcgatactggcccactcgatcctgagtgtgattgctacacctgtcgcaattattcacgcgcttacttgcatcatctcgaccgttgcaacgaaatattaggcgcgcgactcaacaccattcataaccttcgttactaccagcgtttgatggcgggtttacgcaaggctattgaagagggtaaattagagagcttcgtaactgatttttaccagcgtcaggggcgagaagtaccacctttgaacgttgattaatattaataatgagggaaatttaatgagcttttttatttctgatgcggtagcggcaacgggtgcaccggcgcaaggtagcccgatgtctttgattttgatgctggtggtattcggtctgattttctatttcatgatcctgcgtccacagcagaagcgcaccaaagaacacaaaaagctgatggactccatcgctaaaggtgatgaagtgctgacgaacggtggcctggtcggtcgcgtaaccaaagtagcggaaaacggctacattgctatcgcactgaatgacaccactgaagtagttattaaacgtgacttcgtagctgccgttctgccgaaaggcaccatgaaggcgctgtaattaaaatttttccctaagggaattgccgtgttaaaccgttatcctttgtggaagtacgtcatgctgatcgtggtgattgtcatcggtctgctgtatgcgcttcccaacctgtttggtgaggatccggctgttcagatcactggtgcgcgcggagtcgccgccagtgagcaaacgctgatccaggtccagaaaacgttacaagaagaaaaaataactgctaagtctgtggcactggaagagggcgctattcttgcgcgcttcgactccactgacacccagctgcgcgctcgtgaagcattaatgggcgttatgggtgacaaatacgtcgtggcgcttaatcttgccccggcaacgccgcgctggctggcagccattcatgctgagccgatgaagctcggccttgacctgcgtggcggcgttcacttcctgatggaagtggatatggacaccgcgcttggcaaactccaggaacaaaatatcgatagcctgcgcagcgacctgcgtgaaaagggcatcccgtataccaccgttcgtaaagaaaacaactacggcctgagcatcactttccgcgatgctaaagctcgtgatgaagccattgcgtatctgagcaagcgccatccggacctggtgattagcagccagggcagcaaccagctgcgtgcggtaatgagcgatgctcgtctgagtgaagcgcgtgaatatgcggtgcagcagaacatcaatatcctgcgtaaccgtgtaaaccaacttggcgtggcggagccggtggttcagcgtcagggtgctgaccgtatcgttgttgaactgccaggtattcaggacactgcgcgtgcgaaagagattctgggtgcgacggcaacgctggaattccgtctggtaaacaccaacgttgatcaggccgctgcggcatccggtcgcgtaccgggcgactctgaagtgaaacagacccgcgaaggtcagccggttgtgctgtacaaacgcgtaattctgaccggtgaccatatcaccgactccacttccagccaggacgaatacaaccagccgcaggttaacatctcgctcgatagcgcgggtggtaacatcatgtctaacttcaccaaggacaacatcggcaaaccgatggcaactctgtttgtggagtacaaagacagcggtaagaaagatgcaaacggtcgtgcggttctggtgaaacaggaagaggtgattaacatcgccaacatccagtctcgtctgggtaacagcttccgtattactggcatcaataacccaagcgaagcgcgtcagctttcactgctgctgcgtgccggtgcgttgatcgcgccgattcagattgttgaagaacgtaccattggcccaaccctgggtatgcagaacattgagcaggggctggaggcttgccttgccggtctgctggtttctattctgttcatgatcatcttctataagaagtttggtctgattgcgaccagtgctctgattgccaacttgatcttgattgtcggtattatgtcgctgttgccaggcgcaacgctgagtatgccaggtatcgcgggtatcgtcttaacccttgcggtagcggtcgatgcgaacgtactgatcaacgaacgtattaaagaagagttgagcaacggacgtactgttcaacaggcaattgatgaaggttatcgtggcgcattcagttccatcttcgatgcgaacatcaccacgctgattaaagtcatcatcctgtacatctcgaccgttgcaacgaaatattaggcgcgcgactcaacaccattcataaccttcgttactaccagcgtttgatggcgggtttacgcaaggctattgaagagggtaaattagagagcttcgtaactgatttttaccagcgtcaggggcgagaagtaccacctttgaacgttgattaatattaataatgagggaaatttaatgagcttttttatttctgatgcggtagcggcaacgggtgcaccggcgcaaggtagcccgatgtctttgattttgatgctggtggtattcggtctgattttctatttcatgatcctgcgtccacagcagaagcgcaccaaagaacacaaaaagctgatggactccatcgctaaaggtgatgaagtgctgacgaacggtggcctggtcggtcgcgtaaccaaagtagcggaaaacggctacattgctatcgcactgaatgacaccactgaagtagttattaaacgtgacttcgtagctgccgttctgccgaaaggcaccatgaaggcgctgtaattaaaatttttccctaagggaattgccgtgttaaaccgttatcctttgtggaagtacgtcatgctgatcgtggtgattgtcatcggtctgctgtatgcgcttcccaacctgtttggtgaggatccggctgttcagatcactggtgcgcgcggagtcgccgccagtgagcaaacgctgatccaggtccagaaaacgttacaagaagaaaaaataactgctaagtctgtggcactggaagagggcgctattcttgcgcgcttcgactccactgacacccagctgcgcgctcgtgaagcattaatgggcgttatgggtgacaaatacgtcgtggcgcttaatcttgccccggcaacgccgcgctggctggcagccattcatgctgagccgatgaagctcggccttgacctgcgtggcggcgttcacttcctgatggaagtggatatggacaccgcgcttggcaaactccaggaacaaaatatcgatagcctgcgcagcgacctgcgtgaaaagggcatcccgtataccaccgttcgtaaagaaaacaactacggcctgagcatcactttccgcgatgctaaagctcgtgatgaagccattgcgtatctgagcaagcgccatccggacctggtgattagcagccagggcagcaaccagctgcgtgcggtaatgagcgatgctcgtctgagtgaagcgcgtgaatatgcggtgcagcagaacatcaatatcctgcgtaaccgtgtaaaccaacttggcgtggcggagccggtggttcagcgtcagggtgctgaccgtatcgttgttgaactgccaggtattcaggacactgcgcgtgcgaaagagattctgggtgcgacggcaacgctggaattccgtctggtaaacaccaacgttgatcaggccgctgcggcatccggtcgcgtaccgggcgactctgaagtgaaacagacccgcgaaggtcagccggttgtgctgtacaaacgcgtaattctgaccggtgaccatatcaccgactccacttccagccaggacgaatacaaccagccgcaggttaacatctcgctcgatagcgcgggtggtaacatcatgtctaacttcaccaaggacaacatcggcaaaccgatggcaactctgtttgtggagtacaaagacagcggtaagaaagatgcaaacggtcgtgcggttctggtgaaacaggaagaggtgattaacatcgccaacatccagtctcgtctgggtaacagcttccgtattactggcatcaataacccaagcgaagcgcgtcagctttcactgctgctgcgtgccggtgcgttgatcgcgccgattcagattgttgaagaacgtaccattggcccaaccctgggtatgcagaacattgagcaggggctggaggcttgccttgccggtctgctggtttctattctgttcatgatcatcttctataagaagtttggtctgattgcgaccagtgctctgattgccaacttgatcttgattgtcggtattatgtcgctgttgccaggcgcaacgctgagtatgccaggtatcgcgggtatcgtcttaacccttgcggtagcggtcgatgcgaacgtactgatcaacgaacgtattaaagaagagttgagcaacggacgtactgttcaacaggcaattgatgaaggttatcgtggcgcattcagttccatcttcgatgcgaacatcaccacgctgattaaagtcatcatcctgtatgcagtgggtaccggggcaattaaagggttcgcgattactaccggtatcggtgtggcgacgtcgatgtttaccgcgattgtcggtacgcgtgccatcgtaaacctgctatatggcggcaagcgcgtcaagaagctgtcaatctgaggagtgcgatgtggcacaggaatatactgttgaacaactaaaccacggccgtaaagtctatgactttatgcgctgggactactgggctttcggcatctctggtctgctgttaatcgccgctatcgttattatgggcgtgcgcggctttaactgggggctggattttaccggtggtacggttattgaaattacgctcgaaaaaccggctgaaattgacgtaatgcgtgatgcattgcaaaaagccggttttgaagagccgatgctgcaaaactttggtagcagccacgacatcatggtccgtatgccgcctgctgaaggcgaaaccggcggtcaggtgctgggcagccaggttctgaaggtgattaacgaatccaccaatcagaatgcggcagtgaagcgtattgagttcgtcggtccgagcgtgggggcagaccttgcgcaaaccggtgcgatggcgttgatggcggcgctgctgtctatcctcgtgtacgtaggtttccgctttgagtggcgactggcggcaggggttgttattgcgctggcgcacgacgttatcattacgctgggtattttgtcgttattccatatcgagattgacctgaccattgtggcatcgttgatgtcggttatcggttactcgcttaacgacagtatcgtggtatcggaccgtattcgtgaaaacttccgcaagatccgtcgcggtacgccttacgaaatctttaacgtgtccttgacccagacgctgcaccgtaccttgatcacatccggtactaccttgatggttatcctgatgctgtacctcttcggtggtccggtactggaaggcttctcgctgaccatgcttatcggtgtttccatcggtactgcatcttccatctatgtggcatctgcgctggctctgaaactgggtatgaagcgcgaacacatgttgcagcagaaagtggaaaaagaaggggcggatcagccgtcaattctgccttaatcaagtttcagctgatgttgaaaatcccggtcagaagatcgggattttttttgatgtaaggtgattgcgaaaatccccgcatcttgggaaactgcgcgtaaccctacatttcatccaggtaactttttcatggctatcatcccaaaaaactatgcgcggttagaaagcggctatcgcgaaaaagcattaaaaatctatccgtgggtctgcggtcgctgttcccgcgagtttgtttattccaacctgcgtgaacttaccgttcaccacattgatcacgaccatactaataacccggaagatggcagtaactgggaattactttgtctctattgccacgatcatgagcattcgaaatacaccgaagcggatcagtatggtacgaccgttatcgcaggggaagatgcgcagaaagatgtcggtgaagcgaagtacaacccattcgctgatttgaaagcgatgatgaacaagaagaagtgataaaaaatgccggatatgaaatccggcattctcacaattagaagttgtaacctactaccagataaccaccccagccggtagagcgaacgttgaagttgccgttgccgaagttcagttctgcatcgtcattccactgaccaccgttatgccagtaacgggcaacgacagagtagtgccagtgatcgtaattcagcgccagaatatggctggacgcaatagagttattggtacgtgttttaataccgttgttcgcataaccgctgtcatcgcccaggtcggaaccccagtcgaagttggtgaagccgatgtagctcagctggccgccccacagatcggtaatcggcacaaagtacttcactttgaaacggtaaccgtcccactcgttttcgttcgctgcgccgtagttctgccactggtatttcgcatagacgttcatggacaggctcatcggcagaccagtatcgatgtcggtacccagacccatgtaccaggtgctctggcggccatctttattacgacccatgtcgtaaatgtagttgttcgcgaagtaccactctttgaacggaccaaagctaaggtcagtattggtcagcttgtcgatggagaaacgcggttcgatttccataaacagcggagaaccgtggttccagataccttttgcatcggagttaccgccgaagaataccggcgcatccgcataaccatagaagtcgaaccagtcttttttagcgaatgcttcgtactcaaggtaggtatcgttgcggagctgcggtccgaaacgggtgtgatagcttccgacaacgttaacgctctggtgccaccagtcggaaagatactgcggtttgtcgttttcagctgcgttgacagtaaaagacgaagagagcgccagtaccgcaccggctgccagtaatgtttttttcatatgtatgccactgtttgaaaatcccttgcgggagtgaaaaaggcgcaaattgcgtttctaaatatttcgtatacagaggagcctattataaaaatcattgctcacaaaaatatgtttcgtttcacagttctatcatttacgtaatcgattgcgttcacgtttacacacattcgggcggggattgtactgactttcacccttgttgcaaacttttactatcaatccaggtgatgtaagcggagtaacaaaatgacggagaaagatgttgcgggacgcacaatatcgccccgcaatacgtttactgcataacaggttgaatgtcgtggatacgtacaaagcctaactgatccacagacataccctttaactgtaacggaatatcaacatcgctgggggcgaggacgctggcaggtgcgttaatcaattgattctgcacattgatttcctgaaagttgtctattgttccctgaatttgcccatattcaacggttccgctaaatgcgggtaaagggtcattggattcgccctgaatacgtagcgtcagggtggtgccatctgtatcaggcgtaatattcaccagcgacatacgtaaagtaccgatctggctttccagtcttgctggtgtttttgctccaggcagaaggtaaaccccactgctggattttgcattcagcctgttttgctgagtgattttgaccgtttctttattgagctgcgtcatctcctggttcagcgtgctgacgctgtgtttcatctgtcgcacttcactttgctgcacacaggcgctaaggctgaacaggcttcccagcaggagcagtcgaaaaacgttagtattcataggtcgtccctttctcgtcgcaattagcctagtggtagagggtaaaagcagtgaaagcatcgatcctttatctcaaaagcgttgcgcctttgttgtatcgtcagttcagggtaaaatagatttctgttaaccacctggtcaggacgccgtatgcattgcccattctgtttcgccgtggacactaaggtaattgactctcgtctcgtgggcgagggttcatccgtacgccgccgtcggcagtgtctggtgtgtaatgaacgtttcaccacctttgaagtggcggagctggttatgccgcgtgttgtaaaaagcaacgacgtgcgtgaaccgtttaatgaagagaaattacgtagcggaatgctgcgggcgctggaaaaacgtccggtgagttccgatgacgtcgaaatggcaatcaatcatataaaatcgcagctgcgcgccaccggtgagcgcgaagtgccgagcaagatgattggcaatctggtgatggagcaattgaaaaagctcgataaagtcgcctatatccgttttgcctctgtctaccgcagtttcgaagatatcaaagaatttggcgaagagatcgcgcgcctggaggactaagccgtgcaggacgagtattacatggcgcgggcgctaaagctggcgcaacgaggacgttttaccacgcatcccaacccgaatgtcgggtgcgtcattgtcaaagatggcgaaattgtcggtgaaggttaccatcaacgcgcgggtgagccgcatgccgaggtacacgcgttgcgcatggccggcgaaaaagccaaaggcgcaacggcgtatgtcacactcgaaccctgtagccatcatggtcgtacgccaccgtgttgtgatgcattaattgctgcgggcgtggcgcgcgtggttgctgcaatgcaagaccccaatccgcaggtcgctggacgtggactttaccgtctgcaacaggctggcattgacgtcagccacgggctgatgatgagtgaagctgagcaattgaataaaggctttctcaagcggatgcgcaccggctttccttatattcagttaaaacttggcgcatcgcttgatggtcgcacggcgatggcgagtggcgaaagccagtggatcacttcacctcaggcgaggcgcgacgtacaacgactgcgcgcacaaagtcatgccattttaaccagcagcgccacggtgctggcggatgatccagccttaacagtgcgttggtctgaactggatgaacaaactcaggggctctacccgcaacaaaatctccgtcagccggtacgtattgtgattgatagccaaaatcgcgtgacgccggaacatcgcattgtgcagcagcccggcgaaacctggttcgcgcgtacgcaggaagattctcgtgagtggccggaaacggtgcgtaccttgctgattccagagcataaaggtcacctggatctggttgtactaatgatgcaactgggtaaacagcagattaacagcatctgggtggaagcggggccaacgctcgctggcgcattgctacaggcgggtttagtcgatgagctgattgtctatatcgcacctaaactattaggcaacgacgcccgtggattatgcacgctgccagggcttgagaaattagccgacgctccccaatttaaattcaaagagatacgtcatgtaggcccggatgtttgcctgcatttagtgggtgcatgatctcccggctcgaaagggaagcagcgcacgaaatattatgctaaaatccgcccccctgcggggccatactcgaacccgaaggaagaaaatgaacattattgaagctaacgttgctaccccggacgctcgcgtcgccatcaccatcgcgcgtttcaacaactttatcaatgacagcctgctggaaggtgcaattgacgcactgaaacgtatcggtcaggtaaaagatgaaaacattaccgttgtttgggtgccaggtgcctatgagctgccgctggcggcgggtgcactggctaaaaccggtaaatacgacgcggtgattgcgctgggtacggttattcgtggtggcactgcccactttgaatatgtcgctggtggtgcaagcaacggcctggcgcatgttgcccaggacagcgaaattccggttgcttttggggttctgaccactgaaagcattgaacaagcgatcgaacgtgctggcaccaaagctggcaacaaaggtgcagaagctgcactgaccgcgcttgaaatgattaatgtattgaaagccatcaaggcctgaaattagtaaggggaaatccgtgaaacctgctgctcgtcgccgcgctcgtgagtgtgccgtccaggcgctctactcctggcagttgtcccagaacgacatcgctgatgttgaataccagttcctggctgaacaggatgtaaaagacgttgacgtcctgtacttccgtgagctgctggccggggtggcgactaacaccgcatacctcgacggactgatgaagccgtacctgtcccgtctgctggaagaactgggccaggtagaaaaagcagtactgcgcattgcgctgtacgagctgtctaaacgtagcgatgtgccatacaaagtggccattaacgaagcgatcgaactggcgaaatcgttcggcgcagaagacagccataagttcgtcaacggcgtactcgataaagcagcacctgtgattcgccctaacaaaaagtaatatccaggccggtagattcacggaagaccgttccgcgatcgccggccttttcttttttatctgctgaggcgtaacgtatggcatgtggcgagttctccctgattgcccgttattttgaccgtgtaagaagttctcgtcttgatgtcgaactgggcatcggcgacgattgcgctcttctcaatatccccgagaaacagaccctggcgatcagcactgatacgctggtggcgggcaaccacttcctccctgatatcgatcctgctgatctggcttataaagcactggcggtgaacctaagcgatctggcagcgatgggggccgatccggcctggctgacgctggcattaaccttaccggacgtagacgaagcgtggcttgagtccttcagcgacagcttgtttgatcttctcaattattacgatatgcaactcattggcggcgataccacgcgtgggccattatcaatgacgttgggtatccacggctttgttccgatgggacgagccttaacgcgctctggggcgaaaccgggtgactggatctatgtgaccggtacaccgggcgatagcgctgccgggctggcgattttgcaaaaccgtttgcaggttgccgatgctaaagatgcggactacttgatcaaacgtcatctccgtccgtcgccgcgtattttacaggggcaggcactgcgcgatctggcaaattcagctatcgatctctctgacggtctgatttccgatctcgggcatatcgtgaaagccagcgactgcggcgcacgtattgacctggcattgctgccgttttctgatgcgctttctcgccatgttgaaccggaacaggcgctgcgctgggcgctctctggcggtgaagattacgagttgtgtttcacggtgccggaactgaaccgtggcgcgctggatgtggctctcggacacctgggcgtaccgtttacctgtatcgggcaaatgaccgccgatatcgaagggctttgttttattcgtgacggcgaacctgtcacgttagactggaaaggatatgaccattttgccacgccataaagatgtcgcgaaaagtcgcctgaaaatgagtaatccgtggcatctgcttgctgtcggattcggaagtggattaagcccgatcgttcctggcacgatggggtcgctggcggcgattcccttctggtatctgatgacttttttgccctggcagctctattcgctggtggtaatgctggggatctgtatcggcgtctatctttgtcatcaaacggcgaaagacatgggcgtgcacgatcacggcagtattgtctgggacgaatttattggtatgtggattacgctcatggcgctgccgaccaatgactggcagtgggttaccgccggatttgtgattttccgtattctggatatgtggaagccgtggccgatccgctggtttgatcgcaatgtacatggcggcatggggatcatgattgacgatattgtcgccggggtgatctccgctggcatcctgtattttatcggtcatcactggccgctgggtattctgtcgtagttgtgcaccgatgcctgatgtgacgcttgtcacgtctcatcaggcctgcatacctatttaaatcctacgaccggatgcggtttatacggcgtttccagctcggcgatctgttccggcttcaaggtgatatccaccgcgtttagcagttcatcaagctgttcctcccgagaagttccgataatcggtgcggcaatgcccggtttactcaacaaccaggccagcgcaacttgtgctcgcgttgcaccaagttcttcactgacgcccgttaagcgttctgcaatttgtgcgtcattttcattgctttcttggtagagatttttccccacttcatccgacaccagccgtgcggtggtttctccccaaggacgcgtcagacggccccgcgccagcgggctccatggaatcaccgccacgccttcctgataacacagcggcagcatctcgcgctcttcttcacgataaatcagattgtagtgatcctgcatactgacaaactgcgcccagccgtgctgtttttgtagttccagtgcctgagcaaactgcgaagcgtgcatggatgacgcgccgatataacgcgctttcccggcttttaccacgtcgttcagggcttccagcgtctcttcgatcggcgtgttgtaatcccagcgatgaatttgcaggatatcgacataatccatgccgagacggcgcaggctgtcgtcgatagagcgcaaaatttgtgcacgggataatccttccggtaaatcaccaacgcgatggaacactttggtcgcaacgaccacgtcttcacgacgggcgaaatcccgcagtgcgcgaccgacgatctcttcgctgctgccatcggaatagctattggcggtatcaaagaaatttatgccgccttccagcgcacgtttaatgatgggacggctgctctcttccggcagtgtccatgcgtgattaccgcgatctggctcgccaaaggtcatacagccgaggcaaagtcgggaaacacgaaggtcggtttttcctaaggggttgtattgcatgctgccactcctgccatgaataatttcttaagcatagcaggagtagagtagggattatgccagccaggctttgattttggcttccataccggtggcatcgaggccgagttcggcgcgcatttcttcctgagttccttgtggaataaagaagtccggcagaccaatgttcagcacgggtactggtttacgatgggccatcagcacttcgttcacgccgctgcctgcaccacccataatggcgttttcttctacggtaaccagcgcttcatggctggcggccatttccagaattaacgcttcatcaagcggtttcacgaaacgcatatcgaccagcgtagcgttcagcgattcagcgactttcgccgcttctggcatcagcgtaccaaagttaaggatcgccagtttctcaccacgacgcttcacaatgcctttgccaattggcagtttttccagtggcgtcagttccacgccaactgcgttgccgcgcgggtagcgcaccgcggacgggccatcgttatagtgatagccggtatagagcatctggcgacattcgttttcatcgctcggggtcataatgaccatttccggtatgcagcgcaggtaagagagatcaaaagcgccctggtgggtttgaccgtcagcaccaacaatgcccgcacggtcgatggcgaacaggaccggaagcttttgaatcgccacgtcatgcagcacctgatcataggcgcgttgcaggaaggtggagtagatcgcaacaatgggtttgtagcctccaatcgccagacccgcagcaaaggtcactgcgtgttgctcggcaattgccacgtcgaagtagcgatccgggaatttacgtgaaaactcgaccatgccggaaccttcacgcatcgccggagtaatcgccatcagcttgttatctttcgctgcggtttcgcacaaccagtcgccaaagatttttgaatagcttggtaaaccgccgctacttttcggcagacaaccgctggagggatcaaatttaggcacggcgtggaaggtgattgggtctttttctgccggttcataaccacgaccttttttggtcatgatatgcaggaactgcgggcctttcaggtcgcgcatgttcttaagcgtggtgataagccccagcacatcgtgaccgtccaccgggccgatgtagttaaagcccagctcttcaaacaacgtgccaggcactaccatgcctttaatatgttcttcggtacgtttgagcagctctttaatgggtggcacgccagagaaaactttttttccgccttcgcgcagtgaagagtaaagcttaccggaaagcagctgcgccagatggttgttgagcgcgccaacattttcggaaatcgacatttcattgtcgttgagaaccaccagcatatcaggacggatatcgcccgcgtgattcatcgcttcaaacgccatgccagcagtaatcgcgccatcgccaatgacacagacggtgcggcgatttttgccttctttctcggcagcaactgcgatcccaattccggcactgatggaggttgatgaatgcccgacgcttaatacgtcatattcgctttcgccgcgccacgggaacgggtgcaggccacctttctgacggatggtgccgattttgtcgcggcgcccggtcaaaattttatgcggataagcctgatgccccacatcccagattaactggtcaaacggggtattgtagacatagtgcagcgccacggtcagttcgaccgtgcccagcccggaggcgaagtgcccgctggaacggctcacgctgtcgagtaaatagcggcgcagttcgtcgcagagtttcggtaaactctctttcggcaacagtcgtaactcctgggtggagtcgaccagtgccagggtcgggtatttggcaatatcaaaactcatcaggggcctattaatacttattgtttatttattacgctggatgatgtagtccgctagcgcttccagtgccgaggtatcgagtgactgttcagtcagttgtttcagcgactgacgggcatcgtcgatcagatcccgggctttcttccgggcttgctcaagacccagaagtgcagggtaggtacttttaccaagttgctggtcggcaccctggcgttttcccaacgttgcagtatctcccaccacatccaggatgtcatcctgaacctggaaggcaaggccgatgctctctgcgtacttgtcgagtactggcagtgcatttcgtcctttatctccggcgcttaatgcaccaaggcgaacggcggcgcgaatcaatgcgccggttttatgacgatgaatacgctcaagcgcgtccagaggtacgtgtttgccttcagcgtctaaatctaatgcctgaccaccgcacattccggcaataccgctggcgctcgccagctcagaaatcatcgaaattctgtcgcgatctgacacttccggcatatcggcatcgcttagaatcgagaacgccagcgtttgtaaagcgtcaccagcgagaatcgcgtttgcttcgccaaacttcacatggcaggtcggcaaaccgcgacgcagatcgtcatcatccatcgccggtaaatcatcatgaattaatgagtaagcgtggatacactctacggcggcagcgggtgcgtccagtgtgtttatgctaacgccgaacatatgaccagtggcataaaccaggaaaggtcgcaggcgcttaccacctaataatgcgccatactgcatggtttcgaccacgggagtgttctgaaagggcagtggggcgataaaacggctcagcgcctggttggcctgcttaacgcaggcttcgagttgctgcggaaagtccattactcattgtccggtgtaaaaggggttagagaggcgtcttcattgtcagacagcagaatttgtacgcgctgttcggcttgttgtaatttggcctgcccctgacgtgccagctgcacgccgcgttcgaactcgttcagcgcctcttccagcggtaggtcgccactttccagacgggttacaatctgttccagctcgctcagcgccttttcaaagctggcgggagcctcatttttcttcggcataatgaatgtctgactctcaatatttttcgccccgtcatggtaacggactcagggcaaatagcaaataacgcgcaatggtaaggtgatgtgcgcagcaaagcgatgttagtggtatacttccgcgcctggatgcagccgcaggtgtgggctgctgtatttttccctatacaagtcgcttaaggcttgccaacgaaccattgccgccatgaagtttatcattaaattgttcccggaaatcaccatcaaaagccaatctgtgcgcttgcgctttataaaaatccttaccgggaacattcgtaacgttttaaagcactatgatgagacgctcgctgtcgtccgtcactgggataacatcgaagttcgcgcaaaagatgaaaaccagcgtctggctattcgcgacgccctgacccgtattccgggtatccaccatattctcgaagtcgaagacgtgccgtttaccgacatgcacgatattttcgagaaagcgttggttcaatatcgcgatcagctggaaggcaaaaccttctgcgtacgcgtgaagcgccgcggcaaacatgattttagctcgattgatgtggaacgttacgtcggcggcggtttaaatcagcatattgaatccgcgcgcgtgaagctgaccaatccggaagtgactgtccatctggaagtggaagacgatcgtctgctgctgattaaaggccgctacgaaggtattggcggtttcccgatcggcacccaggaagatgtgttgtcgctcatttccggtggtttcgattccggcgtttccagttatatgctgatgcgtcgcggctgccgcgtgcattactgcttctttaacctcggcggcgcggcgcatgaaattggcgtgcgtcaggtggcgcattatctgtggaaccgctttggcagctcccaccgcgtgcgttttgtcgccattaatttcgaaccggtcgtcggggaaattctcgagaaaatcgacgacggtcagatgggcgttatcctcaaacgtatgatggtgcgtgccgcatctaaagtggctgaacgttacggcgtacaggcgctggtcaccggcgaagcgctcggccaggtgtccagccagacgctgaccaacctacgcctgattgataacgtctccgatacgctgatcctgcgtccgctgatctcttacgacaaagagcacatcatcaacctggctcgccagattggcaccgaagactttgcccgcacgatgccggaatattgcggcgtgatttccaaaagcccgacggtgaaagcggttaaatcgaagattgaagcggaagaagagaagttcgacttcagcattctcgataaagtggtggaggaagcgaataacgttgatatccgcgaaatcgcccagcagaccgagcaggaagtggtggaagtggaaaccgtcaatggcttcggcccgaacgacgtgatcctcgatatccgttctatcgatgaacaggaagataagccactgaaagtcgaagggattgatgtggtttctctgccgttctataaactgagcaccaaatttggcgatctcgaccagagcaaaacctggctgttgtggtgtgagcgcggggtgatgagccgcctgcaggcgctctatctgcgcgagcagggctttaacaatgtgaaggtgtatcgcccgtaatatgtggttgtaacgtcgcatctggtcagatgcgacgtttaccgcatccgacactactcgtaataattataaatccctgccgccatcaccagttgtgatgccacttcatgggctttctcgcgcccaaccagcaggtcgataattttcagaccaaagtcgatagctgtacctggcccctggctggtcagcaattttacccgtgcatcccagacgacgcgcttgtcctgccattgttcggcgggtattttgtctttcagcgtcgggaagccggtcatattgccaatcgggaagatatcgtgcgggaccagcacggtggctggcgcggcgcaaatagccgcgacgatacgcccggaacggtggaactgtttaacggtttcaaccagcagggtgctatcgcgaaaacactctgcgcctttgatgccaccaggcagcacaatcacgtcatattcgccatcagccacttcaaccagcggcgcatccgccagcagcttcacgccgcgcgagcaggtaatcgccaggttaccatcgctggcgacgctggcagtggtgactttgataccgccgcgaaccagcagatcgatagtggtgacggcttcagtctcttcactaccaggggcgaggcaaaccagtgccgatgcgctcatattcactctcctttctttttaccatttcaaacaggcgggtgttttccggtacggcaatcccatgcgcgcgggcgcggcgtaagagaaaaccattgatatagtcgatttcggtgtggcgcagcgcgcggatatcctgcaacatcgacgagatattttccgctgttgcatcaatcacctgcatcacgtaatcacgcaaatcttctgctgaagtatgatgcccttcgcgttcgatcactgccgcgacttcttcgcatatctgtataatttcttgcggatgatgacgtaattcaccattcgggcaattccaggtggcggtcagtggattaatcacacagttgactgccagcttgcgccacagctcggcgagaatattgttatgccaggcaacgtcaggcaatacggtttgcaaaatatccgccagataactgtaatcgccgtcctgttgccgtgccggaccaatatgcgtgataccgtttgccacatgaataatgacattgccgtcgcggcgggcggcatgggtggtggtgcccatcagtaatggctgctgaatgttttgcaactcttcgatggtgcccatgccgttgtgaattaacagtattggcgtggttacaggcagtgtggacgcgaggcttttgacggcatcggaaacctgccatgctttcagcgtcaccaggagcagatcgctggtggcgagaaaatcgggatcgttggcggtcagcgattcgttaaatatcgaaccatctgtctcaaccagattcacactacaataaggttgcggtacgcgcagccagccctgaacgtcgtgaccctgtttacaaagtgctgtaagccataattgccctaaggcaccgcatcccaatacggtaattttcattgttcctcctcacccgcaaccactccgggtgttcaataaggctatcccttaattgtgcatgctgttgcgactatgcacaattaagggatacgtcctggtgcaggactgttggttatttaactttgcaggtattatgcttcgcatcaaaaatgaagggagaggaaaagatgccatctttcgatattgtctctgaagttgatcttcaggaagcacgtaacgcggtcgataacgcgagccgcgaagtggagtcccgttttgacttccgtaacgttgaagcctcatttgagctgaatgacgccagcaaaaccatcaaagtgttgagcgagtccgacttccaggtcaatcagttgctggatattctgcgtgccaagttgctgaagcgcggcattgaaggcagttcactggatgtaccggaaaatatcgttcatagcggtaaaacctggtttgtggaagcgaaactgaaacagggcattgagagcgcgactcagaagaaaatcgtcaaaatgatcaaagacagcaaactgaaagtgcaggcgcaaattcagggcgatgagatccgcgtaacgggtaaatctcgtgatgatttacaggctgtcatggcgatggtacgtggtggcgatctcggtcagccgttccagttcaaaaacttccgcgattaatcgcgacaacctgcgctttgttcatgtcagatgcggcatgaacgcctgattcggcctacaaaggtttgtaactcaggaacttagtaggcctgataagcgtagcgcagcaggcaatttcgcctcgcttttatgcctggcgaattgcctgttcaacctcaaagcgattcgtcactttgctgtcgattttcacataagctgaatgttcttcttctgcaatcaacacttctttgatgccttcagtttccagcaaacgcacttttaacgcctcgtttgcggcaatgttcgccgggatttcaatgcgcaagctgctgacatacggcggttctttcatggtactggcgactgccagccacactgcggccagcattgcgccagcgagaaatacgccctgaccgtcaaacatgccgtcaatccagccgcccagcgaaccgccaatcgccacgccaagaaactggctggtggagtaaacacccatcgccgtacctttgtaacctgctggcgactctttactgataagtgaaggcagaagggcttccatcaaattaaacgccacaaagaaaagctgcacgccgaccaccagttgccagaactgcgtttgtgcgttccacaacacaatttccgcaaccacgatcaacccgacgcagaagacaaagacttgcttcattttgcgcttaacttcagcgtagataatgaaaggcacgaccgagccaaaggcgattaacatcgttgccaggtagaccttccagtgttcagccgccggtaaccccgcatcagccatctgtccgggcagggcaacaaaggtcgacatcagcaaaatatgcagacacataatgccaaagttgagtttcagcagccgcggttccgccagcactttactgaaactgcctttcaccattccggactcacgattaagtacgtgagtgctactgttgggcacaacccaaatggtcaacgcaatgccggttgttgccagaatagcgatcatccagaacagcgcgtgcagcccaagtttgtgagtgatgatcgggccaagcaccatcgcaatggcaaaggtaatgccaaagctcacgccgataaacgccatcgctttggtgcggttttgttcgcgcgtgagatcggaaagcagcgccataacggcagcggcaatcgcaccggagccttgtagcgcccgacccagaataattccccagatggagtcagagagcgcagcgataacgctaccggcggcaaacaccgccagcccaccgacaattaatggtttgcgaccaatgcggtctgaaagcaggccaaacggaatctgaaaaacggcctgagtcagaccataaataccaatggcaataccgattaatgcttcgctggcaccttgcagagccatgccgtacgtggtcagaaccggcagaaccatgaacatgcccagcatgcgcaacgagaaaacggtgcctaaaccccaggtcgcgcgccgctcacctgacgtcattttataatcgttcattaccacctctgttttaaatccgcgactagtgtaaagcggcaaacgaatggggtaaacatgcggattttttagtaaatatttcgagagggatatgattctaatgctaagaaaaaaggtgccgtagcacctttttaactgagaggttgtgttaccacacagcagccagcagcgtatgcgagtccggcaccataaaatcaacggacatcatcaccgagagggcagtgatggcgatgatagagaaaccgaacagcttgcgtgcccagattctgtcatcagcaactttatagccgcgcagagccatgcctaaccaccagacgctcaccgcagcggcgaccaccagatatttatacccagcgtagccgccaagagagagcatcagcgtggcaacggcaaaggcgatgatatacagcgtgatgtgattcttcgccaccgaaatgcctttcaccaccggcagtaccggaatgtttgctgcctgataatccttaaagcggaaaatggctatggcataagagtgaggcatctgccacaggctgaagatagccagcaggatcgctgcgccgctatcgaactcgccggttaccgcacagtaaccgatcaccggaggcgcagcgccggagagcgaaccaatcaaggtgccgtagacagaatgacgtttcatgtacaggctataaacgccgacataaaccacaaagcccatcacccccagccagcaggccagcggattcgcgccaaaccacagcagcataaagccagcaatacccagcaaggtggcgtacaccagcgagacagcaggagagatcaggcctttaaccagcacccgattcttcgtcctttccatctttctgtcgatatccctgtcgatgtagttgttaaacacacaacccgacgccacaaccagtgacaccccaaccagcgtgtagataaacaggggataatcaatgctgccctttgaggccaacaggaatcccccaatcaccgagatcaggttgccaaagatgatgcctggtttcgttacttgcaggtattgcttaaacatcataaccgccgctcttagtgcatcatcatgttgtagttgaggttccacataatccaaatggagcccacaaccaggatggcgatgattagcacggtgaagacaaatgccgtcatattccagccttcatctgatttggtattcatgtgcaggaagcacaccagatgcaccagaatctgtaccactgccattgccaggattgttcccagaattacggccggagaggcagcccctgtcatcaccatccagaacggaatcaccgtcagaatgatcgacaggataaagcctgtcatgtaggtttttacgctgccatgggacgcgccgccgctcacgttagaatgactcattacatcgcccccatcagataaacaacagtgaacacacagatccaaaccacatccaggaagtgccagaacaggctcagacacatgatgcgggtacggttagtgctggtcaggccgcgacgggcgatttgcaccatcagcaccgccatccagataagaccggaagtgacgtgcagaccgtgcgtgccgaccaacgcaaagaacgctgacaggaagccgctgcgatccggacccatgccgttaacaatcaggtgatggaattcatagatttccatcccgataaatccggcaccaaacaaccatgtcaacgccagccaggagatcacctggcttttgttgtttttgtacatggcgatagccgccatgccataggtgatggagctgaacaacagcaagaaagtttcaaccagaacgaacggcagttcgaaaatgtccttacctgtcgggccgcctgcggtgccgttcaccagaacggcataggtagcaaacaagatagagaacagaatgcagtcgctcatcaggtagatccaaaatccgaaaattttggttccgcctgcatcgtggtgcccgtgttcgtgcgcgtgggcagtcgcgtgcgtcaaagtatcagttgccatttttcagccctgccttagtaatctcatcgaaatgctggttttccagtttttcgatttctgccaccggcacgtagtaatccacgtcctcgtcgaagcttttcacgatccaggtgatgatcatgcctgcgaagccaacaatcgccagccaccagatatgccagatcatggcgaaaccgaagatggtggagaaagccgcaatgacgataccggcaccgctgttttttggcatatgaatttcttcatagtggtcaggctttttgtacgcttcgcctttctctttcatttcccagaatgcatcacgttcgtgaacgtgcggcacaacggcaaagttatagaacggaggcggggaagaggttgcccactccagcgtacggccaccccacgggtcgccagtcaggtcacggttctggtcgcggtcgcgaatagaaacgtacatctgaataacgaggcagagaatacccagcgcaatcagtaccgcaccgctggctgcaatcatcagcatggtgtggaactgcgggtcaatctgctggctcaaacgacgggtcatccccataaagcccaacgcatacagcggcataaaggcaacgaagaagccgatgatccagaaccagaacgcgcgtttaccccaggtttcgttcagtttgaaaccgaacgctttaggccaccagtaggtcatccctgcgaagcagccgaagaccacgccgccgatgatcacgttatggaagtgtgcaatcaggaacaggctgttatgcagaacgaagtctgcgccaggtactgccagcagcacgcctgtcataccgcccaccgagaaggtgacgataaaaccgatggtccacagcatcgcagaatggaacacgatgcggccctgatacatggtgaacagccagttgaagatcttcaccccggttgggatggcgataatcatggtggtgataccaaagaaggcgtttacgttcgcgcccgcacccatcgtaaagaagtggtgcagccaaacgatgaacgacagcacggtgatacagacggttgcccataccagcgaggtataaccaaacagacgtttacgcgagaaagttgccgcaatttcggagaacacaccgaatacaggcaggatcaagatgtaaacttccgggtggccccaggcccaaatcaggttgatatacatcatcatgttgccacccatatcgttggtaaagaaatgggtgcccagatagcgatccagggtcaacaacgcgacggtaaccgtcagaattgggaaggaagcaataatcagtacgtttgcgcacagtgatgcccaggtaaatactggcatcttgaacatggtcatgcccggtgcgcgcatcttcagaatggtaacgaagaagttgataccggtaagcgtcgtacctataccggatagctggagactccatatccagtaatcgacaccgactcccggactgtactctattcccgatagcggtggataggccagccagccggtctgcgcaaattcgcccacgccgagagaaacgttaaccagaatcacaccaacaacggtaaaccagaagcttaagttgttgaggaacgggaacgcaacgtcacgcgcgccgatctgcagcggaaccaccaggttcatcagaccgataacgaaaggcatcgccacgaagaagatcataatcacgccgtgcgcggtgaagatctgatcgtagtggtgaggtggcaggaaacccgcttcgcccgccgaggcaagagcctgctggctacgcatcataatggcgtcagcaaaaccacgcagtaacatcacaatcgccacgatgatatacatgataccgaggcgtttatggtcgacggaggtcagccactctttccacaggtaggtccacttaccgaagtaagtgatcaggccaacgagcgccagacctcccaaaataatgccagcgatcgtaaccatgacgataggttcatggaacgggactgcatcaagtgataattttccgaacatctttattcttcctcaacccctttaatgggcggattccgcgtggctcatgtccatgccttccataccttcgtgtgcactgtgctcaccttctggctgggtcatgtccatgctcttaccgtgagccataaacttgttaatcacatcagcaaacaagtctggtttcacgttggagaaatattccacctggttgtattcgctaggcgcggccagtttttcgaacgctgccatgtcagacatggtgttcggcgactgtttcgcttttgcgacccattggtcgaatgcggcgcgatccggtgttgcaatagctttgaacttcatgcctgagaagcccgggccgctgtagctggcggagataccgtcataagtaccgggttcgttggcgatcagatgcaggcgagtctgcataccggccatggcataaatctggctacccagacgcggaatgaagaaggagttcatcacggagttggaggtcactttgaagtacaccggagtgttcgccgggaaagcgatttcattcacggtagcaatgccctgttccgggtagatgaagaaccatttccagtccatggaaaccacttcgatggtaatgggcttctcgtcgtgtgccagcggcttgctaggctcaagagcgtgagtggttttccaggtcagtaccgcaaggaagatgatgattaagataggtaccgtccagaccacagcttccactttattggagtgtgaccagttcgggctgtacttagcatctttattgctcgcacggtacttccaggcgaaaccaacagccatcaagattgcgggaataacgacaatcaacatcaggccaaatgccgtcagtatcagtgaacgttgctccagaccaatctgtcctttgggatctaacagcgcagaattacagccactgagcaatacagtgcctgcaaataatgacaaccatcccaaacttttattgtatttcctgagtctcatttaacgacctcaattccacgggatctggtggcgtttaaagtgtgtgggcattttacgggaaggttacattactgtaaacatgattaaattcctgttacttggatttggctgtcaggtcacatatgttgcaaaacatatcaagttgattttaagaagctgttgcaaaagggcgttataacgaaaggggagtgcagaaggagtttgggcgggcaattggtataatcaatataaaataaaacaattatttaacaaataattatcattgaggtgacaactgggtggtgagaaaataaggactcattagctgaatcgtgtaagaaaaatagaattcataaattgcgtcaataatttccaaacgctaagccgcacaaaagaacaaatattaataagcgatgctgatgtttatttagccgtaataattacggcgagtgattactacagctaaataatattacagattacatcagatgtgtttttcgtagcgccagataatccagcaaaccaccaagcacaacgccagaaagggcgactaaaaccccgacttccagcagcgcaggcaggaaagagaagtgcgtcaaatccagcgcgtccattgtcaacagcagtaaccacacggccaacaggctgatgcccgccgccagtgtccacatggcaaaggcataacctgcaggatattcggtacgggagataaagttgtcatttactcgtgtatattcaagcgtctggcggcaaaccagcagcaaaataagccctggtacggcagcggcgacggagaatagatagaatgtcgaccagccgtgtgcttcaacaaaccaacccgccacggggccgacataaactcgccctacagcagaaagcgctgagagcagggcaaattgagtagcggaaaatgacttattacacagcgtcattaacagcgcgacaaaggctgatgtacccatcccgccacagaggttttcgaaaaagacggctgcacccatgctgtagagatgcttatcagtaatcgacagcagccagtaaccggcgttagatgcaccttgtaaaatgccgaaaatcagcagtgcacggaacagcgacaggcgctgcatcaaaatcccaccgtacaatgcgccaacaatggtcgccagtaagccaagcgttttgttaaccacgcctacttcacccgcatcaaacccgacgccgcgaatcaaaaacgtggttgtcaggctcatagcgaatgcgtcgcccagcttatacagcacgataagaagcaaaataagccaggcattattgcgaccaaagaaatctcgcagaggtgcaacaaccgcttgttccagcgttttgggcacaggaatggtgtcggtgggttctggtgcaagcaacgtcgcgataatacaggggatcaacagcgccgccatcaaccagtacatgccctgccagcccagccatttatctgccagccacagggctaagccgccggaaaccagcatccctaaacggtaacccagcacgctgattgccgcgcccgcaccacgttcttctgccgggagcacatcggttttccacgcatcgaagacaatatcctgggaggcagagcaaaaagcgatcaccaccgccagtgccgccatccagcggagctgggtgcctggttcgagaaaacccatcgccgcaatggcgactaataacagaatttgcgtggcgagcagccaaccgcgccgccgcccgaaaaatgggggcgtgtagcggtccatcagtggtgaccagaggaatttaaaaacgtaagcctggcctaccagagagaagaaaccaatggttttgagatcgatattctcgaccgtcatccaggcctgtaaggtgccggacgtcagggcgagcggtagcccggaagcaaaacccaggatcagcaatatggctgaacgcggctgttgaaaaatacgtaaatattgactggacatgggtgtctacaggcccggcttgcaccgggccagagggcagaaattaacgcgcgttctgcttgatgaattcgtggatgctggtgtcctgagacatatcagcgatggtatcggtcagcacactgttaaccgcatcggcgatatttttgttggaggcctggaatgcaccttcaacgttgtagctggcacgatagtttttggtcattttgttgccattctgcgcggtagcgatgatggcgatatccgctttggtcgcgatgttgtagcgcacgttgccctgggacacgtcagcatacagttggctaacgatgatttgcagattaaccgggccattcggaccaaccatgtatccacgggcggtcatctgtttttccagcacttcttgcagcaggaaacgcagatcgcgggaggcggtcagggtaacgatttgattatcgcgggtgacttttgccagcgcctgatcggtacgctgatcggcaccattaatgcttacggtgacgcccatcaggcttggatcctgctgtggcagtgtaatcgtcggggaaacttcgatagttgttggcggttttgcgcatcctgcaagcataaacagagcaactaacgggaagaggatttttttgaacatgttcgggctctcagagactcttaagcgtgtttggtaaaaattcccgccatcataacattgccaacggcgaggggaagtgggtaaggcatgtaaattcatcatgttgacgaaataatcgcccctggtaaaagaaacgctgatgcgaggcctgtgtttcaatctttaaatcagtaaacttcatacgcttgacggaaaaaccaggacgaaacctaaatatttgttgttaagctgcaatggaaacggtaaaagcggctagtatttaaagggatggatgacatctcagcgttgtcggaggagatatttcatgatgatacgtgagcggatagaagaaaaattaagggcggcgttccaacccgtattcctcgaagtagtggatgaaagctatcgtcacaatgtcccagccggctctgaaagccattttaaagttgtgctggtcagcgatcgttttacgggtgaacgttttctgaatcgtcatcgaatgatttacagtactttagcggaggaactctctactaccgttcatgcgctggctctgcatacttacactattaaggagtgggaagggttgcaggacaccgtctttgcctctcctccctgtcgtggagcaggaagcatcgcgtaaaaacgcatttgcaactgtcggcgcttttccagtatgttgctaaagattttatgaaaaacggcctgcgggccgttttgttttgtctggattttgcgctttttgcccagcattcagacgaaaatcgcccgggaattgtgaaaaaatacgcgacagcgcgcaataaccgttctcgactcataaaagtgatgccgctataatgccgcgtcctatttgaatgctttcgggatgattctggtaacagggaatgtgattgattataagaacatcccggttccgcgaagccaacaacctgtgcttgcggggtaagagttgaccgagcactgtgattttttgaggtaacaagatgcaagtttcagttgaaaccactcaaggccttggccgccgtgtaacgattactatcgctgctgacagcatcgagaccgctgttaaaagcgagctggtcaacgttgcgaaaaaagtacgtattgacggcttccgcaaaggcaaagtgccaatgaatatcgttgctcagcgttatggcgcgtctgtacgccaggacgtcctgggcgacctgatgagccgtaacttcattgacgccatcattaaagaaaaaatcaatccggctggcgcaccgacctatgttccgggcgaatacaagctgggtgaagacttcacctactctgtagagtttgaagtttatccggaagttgaactgcagggtctggaagcgatcgaagttgaaaaaccgatcgttgaagtgaccgacgctgacgttgacggcatgctggatactctgcgtaaacagcaggcaacctggaaagaaaaagacggcgctgttgaagcagaagaccgtgtgaccatcgacttcaccggttctgttgacggcgaagagttcgaaggcggtaaagcgtctgatttcgtactggcgatgggtcagggtcgtatgatcccgggctttgaagacggtatcaaaggccacaaagctggcgaagagttcaccatcgacgtgaccttcccggaagagtaccacgcagaaaacctgaaaggtaaagcagcgaaattcgctatcaacctgaagaaagttgaagagcgtgaactgccggaactgactgaagaattcatcaaacgtttcggcgttgaagatggttccgtagaaggtctgcgcgctgaagtgcgtaaaaacatggagcgcgagctgaagagcgccatccgtaaccgcgttaagtctcaggcgatcgaaggtctggtaaaagctaacgacatcgacgtaccggctgcgctgatcgacagcgaaatcgacgttctgcgtcgccaggctgcacagcgtttcggtggcaacgaaaaacaagctctggaactgccgcgcgaactgttcgaagaacaggctaaacgccgcgtagttgttggcctgctgctgggcgaagttatccgcaccaacgagctgaaagctgacgaagagcgcgtgaaaggcctgatcgaagagatggcttctgcgtacgaagatccgaaagaagttatcgagttctacagcaaaaacaaagaactgatggacaacatgcgcaatgttgctctggaagaacaggctgttgaagctgtactggcgaaagcgaaagtgactgaaaaagaaaccactttcaacgagctgatgaaccagcaggcgtaatttacgtagcataacgcgctaaattcgcacaaaggcccgtcaccgccaggtggtgggcttttttttgtcatgaattttgcatggaaccgtgcgaaaagcctctttcggtgttagcgtaacaacaaaagattgttatgcttgaaatatggtgatgccgtacccataacacagggactagctgataatccgtccataaggttacaatcggtacagcaggttttttcaattttatccaggagacggaaatgtcatacagcggcgaacgagataactttgcaccccatatggcgctggtgccgatggtcattgaacagacctcacgaggtgagcgctcttttgatatctattctcgtctacttaaggaacgcgtcatttttctgactggccaggttgaagatcacatggctaacctgattgtggcgcagatgctgttcctggaagcagaaaacccagaaaaagatatctatctgtacattaactctccaggcggggtgattactgccgggatgtctatctatgacaccatgcagtttatcaagcctgatgtcagcaccatctgtatgggccaggcggcctcgatgggtgctttcttgctgactgcaggggcaaaaggtaaacgtttctgcctgccgaattcgcgcgtgatgattcaccagccgttgggcggctaccagggccaggcgaccgatatcgaaattcatgcccgtgaaattctgaaagttaaagggcgcatgaatgaacttatggcgcttcatacgggtcaatcattagaacagattgaacgtgataccgagcgcgatcgcttcctttctgcccctgaagcggtggaatacggtctggtcgattcgattctgacccatcgtaattgatgccagaggcgcaactgtgccgctatacttatccagggcggcacaacgctgtaagcggcttgcgcctgagaatggcatttgcgtcgtcgtgtgcggcacaaagaacaaagaagaggttttgacccatgacagataaacgcaaagatggctcaggcaaattgctgtattgctctttttgcggcaaaagccagcatgaagtgcgcaagctgattgccggtccatccgtgtatatctgcgacgaatgtgttgatttatgtaacgacatcattcgcgaagagattaaagaagttgcaccgcatcgtgaacgcagtgcgctaccgacgccgcatgaaattcgcaaccacctggacgattacgttatcggtcaggaacaggcgaaaaaagtgctggcggtcgcggtatacaaccactacaaacgtctgcgcaacggagataccagcaatggcgtcgagttgggcaaaagtaacattctgctgatcggtccgaccggttccggtaaaacgctgctggccgaaacgctggcgcgcctgctggacgttccgttcaccatggctgacgcaaccacgctgaccgaagccggttatgtgggcgaagacgttgaaaacatcattcagaagctgttgcagaagtgcgattacgacgtacagaaagcgcagcgcgggattgtctacatcgatgaaattgacaagatttctcgtaagtcagacaacccgtccattacccgagacgtttccggtgaaggcgtacagcaggcactgttgaaactgatcgaaggtacggtagctgctgttccgccgcaaggtgggcgtaaacatccgcaacaggaattcttgcaggttgatacctctaagatcctgtttatctgtggcggtgcgtttgccggtctggataaagtgatttcccatcgtgtagaaaccggttccggcattggttttggcgcgacggtaaaagcgaagtccgacaaagcaagcgaaggcgagctgctggcgcaggttgaaccggaagatctgatcaagtttggtctgatccctgagttcattggtcgtctgccggttgtcgcaacgttgaatgaactgagcgaagaagctctgattcagatcctcaaagagccgaaaaacgccctgaccaagcagtatcaggcgctgtttaatctggaaggcgtggatctggaattccgtgacgaggcgctggatgctatcgctaagaaagcgatggcgcgtaaaaccggtgcccgtggtctgcgttccatcgtagaagccgcactgctcgataccatgtacgatctgccgtccatggaagatgtcgaaaaagtggttatcgacgagtcggtaattgatggtcaaagcaaaccgttgctgatttatggtaagccggaagcgcaacaggcatctggtgaataattaaccattcccatacaattagttaaccaaaaaggggggattttatctcccctttaatttttcctctattctcggcgttgaatgtgggggaaacatccccatatactgacgtacatgttaatagatggcgtgaagcacagtcgtgtcatctgattacctggcggaaattaaactaagagagagctctatgaatcctgagcgttctgaacgcattgaaatccccgtattgccgctgcgcgatgtggtggtttatccgcacatggtcatccccttatttgtcgggcgggaaaaatccatccgttgtctggaagcggcgatggaccatgataaaaaaattatgctggtcgcgcagaaagaagcttcaacggatgagccgggtgtaaacgatcttttcactgtcgggaccgtggcctctatattgcagatgctgaaactgcctgacggcaccgtcaaagtgctggtcgaggggttacagcgcgcgcgtatttctgcgctctctgacaatggcgaacacttttctgcgaaggcggagtatctggagtcgccgaccattgatgagcgggaacaggaagtgctggtgcgtactgcaatcagccagttcgaaggctacatcaagctaaacaaaaaaatcccaccagaagtgctgacgtcgctgaatagcatcgacgatccggcgcgtctggcggataccattgctgcacatatgccgctgaaactggctgacaaacagtccgttctggagatgtccgacgttaacgaacgtctggaatatctgatggcaatgatggaatcggaaatcgatctgctgcaggttgagaaacgcattcgcaaccgcgttaaaaagcagatggagaaatcccagcgtgagtactatctgaacgagcaaatgaaagctattcagaaagaactcggtgaaatggacgacgcgccggacgaaaacgaagccctgaagcgcaaaatcgacgcggcgaagatgccgaaagaggcaaaagagaaagcggaagcagagctgcagaagctgaaaatgatgtctccgatgtcggcagaagcgaccgtagtgcgtggatatatcgactggatggtacaggtgccgtggaatgcgcgtagcaaggtcaaaaaagacctgcgtcaggcgcaggaaatccttgataccgaccattatggtctggagcgcgtgaaagatcgtatccttgagtatcttgcggttcaaagccgtgtcaacaaaatcaagggaccgatcctctgcttggtagggccgccgggggtaggtaaaacctccctgggtcagtccatcgccaaagccaccgggcgtaaatatgtccgtatggcgctgggcggcgtgcgtgatgaagcggaaatccgtggtcaccgccgtacttacatcggttctatgccgggtaaactgatccagaaaatggcgaaagtgggcgtgaaaaacccgctgttcctgctcgatgagatcgacaaaatgtcttctgacatgcgtggcgatccggcctccgcactgcttgaagtgctggatccagagcagaacgtagcgttcagcgaccactacctggaagtggattacgatctcagcgacgtaatgtttgtcgctacgtcgaactccatgaacattccggcaccgctgctggatcgtatggaagtgattcgcctctccggttataccgaagatgaaaaactgaacatcgccaaacgtcacctgctgccgaagcagattgaacgtaatgcactgaaaaaaggtgagctgaccgtcgacgatagcgccattatcggcattattcgttactacacccgtgaggcgggcgtgcgtggtctggagcgtgaaatctccaaactgtgtcgcaaagcggttaagcagttactgctcgataagtcattaaaacatatcgaaattaacggagataacctgcatgactacctcggtgttcagcgtttcgactatgggcgcgcggataacgaaaaccgtgtcggccaggtaaccggtctggcgtggacggaagtgggcggtgacttgctgaccattgaaaccgcgtgcgttccggggaaaggtaaactgacctataccggttcgctcggcgaagtgatgcaggagtctattcaggcggcgttaacagtggttcgtgcgcgtgcggaaaaactggggatcaaccctgatttttacgaaaaacgtgacatccacgtccacgtaccggaaggtgcgacgccgaaagatggtccgagtgccggtattgccatgtgcaccgcgctggtttcttgcctgaccggtaacccggttcgtgccgatgtggcaatgaccggtgagatcactctgcgtggtcaggtactgccgatcggtggtttgaaagaaaaactactggcagcgcatcgcggcgggattaaaacagtgttaattccgttcgaaaataaacgcgatctggaagagattcctgacaacgtaattgccgatctggacattcatcctgtgaagcgcattgaggaagttctgactctggcgctacaaaatgaaccgtctggcatgcaggttgtgactgcaaaatagtgacctcgcgcaaaatgcactaataaaaacagggctggcaggctaattcgggcttgccagcctttttttgtctcgctaagttagatggcggatcgggcttgcccttattaaggggtgttgtaaggggatggctggcctgatataactgctgcgcgttcgtaccttgaaggattcaagtgcgatataaattataaagaggaagagaagagtgaataaatctcaattgatcgacaagattgctgcaggggctgatatctctaaagctgcggctggccgtgcgttagatgctattattgcttccgtaactgaatctctgaaagaaggggatgatgtagcactggtaggttttggtacttttgccgttaaagagcgtgctgcccgtactggccgcaacccgcagaccggtaaagagatcaccatcgctgctgctaaagtaccgagcttccgtgcaggtaaagcactgaaagacgcggtaaactaagcgttgtccccagtggggatgtgacgaagttcaagggcgcatctactgatgtgccttttttatttgtattcggtgactttctgcgtcttgtgggctgacaattgcccccgtttcttgtcacaataggcctttgcgcgcatcgatacgttgcgtgaggtacacagtcatctacagcggagtgttgttacaccatgatggacagcttacgcacggctgcaaacagtctcgtgctcaagattattttcggtatcattatcgtgtcgttcatattgaccggcgtgagtggttacctgattggcggaggcaataactacgccgcaaaagtgaatgaccaggaaatcagccgtgggcaattcgagaacgccttcaacagcgagcgtaatcgcatgcagcaacagctgggcgatcaatactccgagctggcagcgaacgaaggctatatgaaaaccctgcgtcaacaggtgctgaatcgtctgatcgacgaggcgcttctggatcagtacgctcgtgagctgaaactgggtatcagcgatgagcaggttaaacaggcgattttcgcgaccccagccttccaggttgacggcaaatttgataacagccgctataacggtatcctcaaccagatggggatgaccgccgatcagtacgcccaggcgctgcgtaaccagctcactacccaacagctgattaacggcgttgccggtaccgattttatgctgaaaggtgaaaccgacgagctggcggcactggtagctcaacaacgcgtggtgcgtgaagcgactatcgatgttaacgcgctggcggcgaagcagcctgtgaccgaacaggaaattgccagctactacgaacaaaacaaaaacaatttcatgacgccggaacaattccgcgtgagttacatcaagctggatgccgcgacgatgcagcaaccggttagcgatgcggatatccagagctactacgatcagcatcaggatcaattcacccagccgcagcgtacccgttacagcatcatccagaccaaaactgaagatgaagcgaaagcggtacttgatgagctgaataagggcggtgattttgctgcattagccaaagaaaaatctgccgatattatctctgcccgcaacggcggtgatatgggttggttagaagatgccactatcccggacgaactgaaaaatgctggtctgaaagaaaaaggccaactgtctggtgttatcaaatcttcggtcggtttcctgattgtgcgtctggacgacattcagccagcgaaagtgaaatcgttagacgaagtacgtgacgacattgcggcgaaagtgaaacacgaaaaagccctcgatgcgtactacgcgctgcagcagaaagtgagcgatgcggcaagcaacgacaccgagtctctggccggtgcagagcaagctgccggcgttaaagccactcagacgggttggttcagcaaagataacctgccggaagagttgaacttcaagccagttgccgacgctatcttcaacggcggtctggtaggtgaaaacggcgcgccgggcatcaactctgacatcatcaccgtagacggcgaccgcgcattcgtgctgcgcatcagcgagcacaaaccggaagcggtgaaaccgttggcagatgttcaggaacaagttaaggcactggttcagcacaacaaagctgaacaacaggcgaaagtggatgctgagaaactgctggttgatttgaaagccggcaaaggtgcggaagctatgcaggctgccggtctgaaatttggcgagccgaaaaccttaagccgttccggtcgtgacccgattagccaggctgcgtttgcactgccactgccagcgaaagacaaaccgagctacggtatggcgaccgatatgcaaggtaatgtggttctgctggcgctggatgaagtgaaacaaggttcaatgccggaagatcagaaaaaagcgatggtgcagggtatcacccagaacaacgcacaaatcgtctttgaagctctgatgagtaacctgcgtaaagaggcgaaaatcaaaattggcgatgcgctggaacagcaataatcctgaagccgcctcgcaaaaaaatgctttgcagctgtaacaagaaaaggtcgctttcgcggccttttccatttctgaacattgccatttgtttactgttttcactgccgttaaggtgattccactgttaacaaacaaggagaaaacagtatgaaacacggaattaaagcactgctcattaccctgtccctggcctgtgccggaatgtctcatagcgcgctggcggcagcttctgtggcgaaaccgacaacagtagaaaccaaagcggaagctcctgcagcacaaagtaaagcagcagtaccggcgaaagccagtgacgaagaaggcacccgggtcagcattaataatgccagcgcggaagagttagcccgcgcgatgaatggcgttggcctgaagaaagcgcaggcgattgtcagttatcgcgaagagtacggtccgtttaaaacggtggaggatctaaagcaggtgccggggatgggcaattcgctggtggaacgtaatctggcggtattaaccctgtaattaatttgcatagtggcaattttttgccagactgaagaggtcataccagttatgacctctgtacttataacagttcttataacaacaacgtaaggttattgcgctatgcaaacacaaatcaaagttcgtggatatcatctcgacgtttaccagcacgtaaacaacgcccgctaccttgaatttctcgaagaagcccgctggcatgggttggaaaatagcgacagttttcactggatgacggcccataacatcgccttcgtcgtggtcaatatcaatattaactatcgccgcccggcggtattaagcgacctgttaaccattaccagtcagttgcagcaattaaacggtaaaagtggcatcttaagccaggtcattacactggagccggaaggacaggtggtagcggatgcgcttattacgtttgtttgtattgatcttaaaacgcagaaagcattagctctggaaggggaattgcgcgaaaagctggagcagatggttaagtaaacgttttgtggtgccggatgctcaagccgcatccggcgacacccggaataattacttcaacccggttttctgcttcatcgctgccatcaccgtcggtttatcggccagataatgattcaaaccgttggcacgtaaattacacgccgcacaatgaccgcaaccgtcgcctttaatgccgttataacaggtcagcgtttcgttacggactaaatccagcttgccgtaataatctgccagcgcccaggtttccgctttatcaatccacatcagcggcgtttcaaaacgaatatctttcgccatgcccaaactgacggcatggtttagtgctttcacaaactcatcgcggcaatccgggtagccggagaaatccgtttcgcagacgccggtaattacggcttctgcttttacctgatacgcatatattgccgccagtgtcaggaacaaaatattacgccctgggacaaacgtattcgggataccatcggcttcaggttcataatcaggcaccggaatgctgtcacgcgtcaggctgctgaccgccagctcgttgagcagcgttacatcaagcaccttatgcgcgcgtgcccccagtttcagcgccagttcgcgtgccacgtcgatttctgcgcgatggcgttgaccgtaatcgaacgtcacgcaatggacttcatcatattgttgtaatgcctgcaccagacaggtggtggaatcctggcctccactgaacacaacgacagcacgtttcatagataatcctgcttgaacaataaaaacgttatggtaacgcctgcgattaacccggaccagctattcattgcgacggcgcgggaagccaggcttcggtaaattcaaaccagccgcgcggtgtcagtcgcacaccgttcacgccgggaggggcgctaatgcgatagtgatagttgaacagcggcgtcagcgtcgcatctgccattaactggctaaaaaccgctttcagggcattaaatcggttttcctcatcaggcattacttgcactgcgtccagtgtcgattgcaaatgtgcatatgctggagcgtcgaaaacatgtggccacagtggatcgcaacgcagccattgctccagggtatattccggtgcttcgccaattaatctgtcgcccatcatgaggtctgcgtgtgccagtagggtcgtgtcgtcccagttttttgcgttatgaaaaataattgtgagttcacagccttccgctgccagtgtcgcctgtaggcgttctgccatggtatgaagttctatcggtaggtgataaaccagcgtcaaggttttcggtagtttaacttcatccggtacttgccaatgcggaatagtccagcctggcagtaatgcatgactggcagtgatcaggttttctccgacttctaacgtttgtaataaaccggattgatgaataatggagattacttttcgcgcctgccagagggacagtcggagacttttgcgcaatgttaaatagcaaaaacctaaactgatgccgctactgacctggctgacccgttgcagctcctccggtttgccaatggtgatttgcacgggatgccgacaactggttcccatatctttttcgaaaagcggcggagttatccagtactcaaccgctttaagcagcggatgacgtaaatggtaataatcatggctctccaggcgcaccagttccgctgtgaattgtgttaagcgaaaaggacctgtgccgatcagtgggaattgcggatgcgccagatggctgcaatagctcgccagtcggtgcgcaagccagtaatcggggcgatgtaaaaagaaggtcagacactgcggatgggtgacttcaatacgcttcacgctaataaataattgatccagtgctggcagttgtaacagcatcaataaccgctggtgtaagtgggaggcttttactgcatcgccgttatgccagtgtaaggttgagcgaagataaaaatcccagcgtaacccgtcagtagaggtttcccagtgatgcgctaaatcgccaatcgggcgctgggtattattatcgaagcgggtcaggccggaaaatatctgcccggccagatgctgctcggcacggccgggcaaaaagcccggttgtagcggttcgagcgggcgatagtagggaatacgcaacgtgggcgtatcgttttgccattgtccgcccataaacggctgtaacagagtgcgcaactcacctggggccagttgcgccagctccagcacatcttgctgctttccggtttccagcgcctgttccatcatcgcattgcgtagcgattctggcgtgaccagaaagcgcagttgaccgcgctttccgcgtcctgactgcgcctgccactccagccatcccgcctcctgtgcctggcgtaacagcgtacgaacatggcgttcgctgcaaaaacagcgttcggccagttcgctgacggtgacggtttgcggctttccggcggaaggttgccacagacgttgatactggttaagacggttgagcagtcgcatataaacccggaacaatattatttaactattcactattacttccgtatatatcaggtgatactcaatcaccattaaccgtgtcacagagtggagaaagaaatggctcgtctggcagcatttgatatggatggcactttattgatgcctgaccatcatttaggtgagaaaaccctctctactttggcgcggctgcgtgaacgcgacattaccctcacttttgccacggggcgtcatgcgctggagatgcagcatattctcggggcgctatcgctggatgcatatttgattaccggcaacggaacgcgcgtgcattctctggaaggtgaacttttacatcgtgatgatttacctgcggatgtcgcggagctggtgctgtatcagcaatgggatacccgagccagcatgcatatcttcaatgacgatggttggtttaccgggaaagagaaccctgcgttgttgcaggcatttgtctatagcggttttcgttatcagataatcgatgtcaaaaaaatgccactcggcagcgtcaccaagatctgcttctgtggcgatcacgacgatcttacacgcttgcagatccagctatacgaagcattaggcgagcgtgcacatttatgtttttccgccacggattgcctcgaagtgctgccggtgggttgcaataaaggcgctgcattgacggtgctgacccaacatttaggtttatcgttacgcgattgcatggcctttggtgatgcgatgaacgatcgcgaaatgttaggcagcgtcggtagcggatttattatgggcaatgcgatgccgcaactgcgcgcggagctcccgcatttaccggtgattggacattgccgaaatcaggctgtctctcactatttgacgcactggctggactatccacatctaccttattcccccgaataacgagatcccttccagcaccgggcaattgcccggtttttttgtttttttgcgttgaatttgtcattttgtgccgtgatgcttaaaccgcacagaataaattgtcgcgatttcacctttaaaatagaattaaaagagaaaaaaattctctgtggaagggctatgttagataaaattgaccgtaagctgctggccttgctacagcaggattgcaccctctctttgcaggcactggctgaagccgttaatctgacaaccaccccctgctggaagcgtctgaaacggctggaggacgacggtatccttatcggcaaagtcgccctgctggatccggaaaaaataggcctcggcctgaccgcctttgtgctgataaaaacgcaacatcacagcagcgaatggtattgccgctttgtcacggtggttaccgaaatgccagaagtgctggggttctggcgcatggctggtgaatacgattatctgatgcgcgtccaggttgccgacatgaaacgctacgacgagttttataagcgtctggtaaacagtgtaccggggctgtcggacgtcacttccagcttcgcgatggaatttttttgcgttgaatttgtcattttgtgccgtgatgcttaaaccgcacagaataaattgtcgcgatttcacctttaaaatagaattaaaagagaaaaaaattctctgtggaagggctatgttagataaaattgaccgtaagctgctggccttgctacagcaggattgcaccctctctttgcaggcactggctgaagccgttaatctgacaaccaccccctgctggaagcgtctgaaacggctggaggacgacggtatccttatcggcaaagtcgccctgctggatccggaaaaaataggcctcggcctgaccgcctttgtgctgataaaaacgcaacatcacagcagcgaatggtattgccgctttgtcacggtggttaccgaaatgccagaagtgctggggttctggcgcatggctggtgaatacgattatctgatgcgcgtccaggttgccgacatgaaacgctacgacgagttttataagcgtctggtaaacagtgtaccggggctgtcggacgtcacttccagcttcgcgatggaacagattaaatacaccacttctttacccatcgaataaatatccagaatcaagtcaggacacaacgcgtgcgattatttgctcaattaagctggtatttccgtcgggaatggcgtcgctatctcggggctgtcgccttgcttgtcattatcgcgatgctgcaactggttccgccaaaagtggttggtattgttgttgatggcgtgacagaacaacactttactaccgggcagatcctgatgtggatcgccaccatggtgctgattgccgttgtggtttatctcctgcgttacgtctggcgcgtattgctgtttggtgcgtcttatcaactggctgttgaactgcgtgaagattattaccgccagctaagccggcagcatcctgagttttacctgcgtcatcgcacgggtgacctcatggctcgtgcgaccaatgacgtcgatcgcgtcgtgtttgccgccggagaaggggtgctgacgctggtggattcactggtaatgggctgcgctgtgttgattatgatgtctacgcaaattagctggcagttgaccttatttgccctgttgccgatgccagtgatggcgatcatgatcaagcgcaacggcgatgccttgcatgaacgctttaagctggcacaggcggcgttttccagtcttaatgaccgcacccaggaaagcctcaccagtattcgcatgatcaaagcctttggtctggaagatcgtcagtcggcgttatttgccgcggatgccgaagataccggcaaaaaaaacatgcgggtggcgcgtattgatgctcgtttcgacccgaccatctatatcgcgattggtatggcgaacttgctggcgattggcggcggtagttggatggtggtacagggcagtttaacgctgggccagctcaccagttttatgatgtatttaggtctgatgatttggccaatgctggcgctggcatggatgtttaacattgtggaacgtggcagcgcggcgtatagccgaattcgtaccatgctggccgaagcgccagtcgttattgatggtagtgataaggtgccagaaggtcgtggtgaactggatgtgaatattcgccagtttacgtatccgcagactgaccatcctgcgctggaaaacgtcaatttcgccctgaaacccggtcagatggtaggtatttgcgggccgactggttccggcaaaagtaccctgttgtcgctcattcagcgtcatttcgacgtcagcgagggggatatccgctttcatgatattcctctgacgaagttacaactcgatagctggcgtagccgcctggcggtagttagccagacaccgttccttttttccgacaccgtagcgaacaacatcgcgttgggttgcccgaatgccacccagcaagagattgagcatgtcgcgcggttagccagcgtgcatgacgatattttgcgtttaccgcaaggttacgatacagaagtgggcgagcgcggcgtgatgctttccggtgggcaaaaacagcgtatctccattgctcgtgcgttattagtcaacgcggaaatcctcatccttgatgatgcgctttcagcggtggacggacgcacagagcaccagatcctgcataacctgcgtcagtgggggcagggaagaacggtaatcatcagtgcccatcgcctttctgcactgacggaagccagtgaaattattgtgatgcagcacggacatatcgcccagcgtggcaatcatgatgagctggcgcaacaaagtggctggtatcgcgatatgtatcgctatcaacaactggaggcggcgctcgacgacgctccggaaattcgcgaggaggccatcgatgcgtagttttagccaactgtggccgactctcaagcgcctgttagcgtacggttcgccgtggcgtaaaccgttggggattgcggtcctgatgatgtgggttgcggcggcggcagaagtcagtgggccgctgcttatcagctattttatcgacaatatggtagcgaaaaataacctgccgttgaaagtggttgcagggctggctgcggcgtatgttgggctgcaactgtttgccgccgggctacattacgcgcagtcgctgctgtttaatcgggcggcagtaggcgtagtgcaacagttgcgtaccgacgtgatggatgctgcgttacgccagccattaagcgagtttgatacccaacccgtcgggcaggtgatttcccgcgtcactaatgacactgaagtgatccgcgatctctacgttaccgtagtggcaactgtcctgcgtagcgccgcactggtgggcgcgatgctggtggcgatgttcagcctcgactggcgaatggcgctggtggcgataatgattttcccggtggtgctggtggtaatggtgatatatcagcgttacagcacgccgattgtccgtcgtgtgcgcgcttatctggcggatatcaacgacggctttaacgaaatcatcaatggcatgagcgttatccagcagttccgtcagcaggcgcgatttggcgaacgtatgggtgaggccagtcgttcacactatatggcgaggatgcaaaccctgcgcctcgacggttttctgctgcgtccgctgctgagtctgttttcatcgctcattctttgtggcttgttgatgctgtttggtttctccgccagcggcaccattgaagtgggcgtgttgtatgcgttcatcagttatttggggcgacttaacgaacccttaatcgaactgaccacgcagcaggcgatgctgcaacaggctgttgttgctggtgagcgcgtttttgagctgatggacggaccgcgccagcaatatggcaatgatgatcgcccgttgcagagcggcaccatcgaagtcgataacgtgtcatttgcttatcgcgatgacaatctggtgctaaagaacattaatctctctgtgccttcgcgcaactttgtggcgctggtcgggcataccggcagtggcaaaagcaccctcgccagtttattgatgggctattacccgctaacggaaggtgagattcgccttgatggtcgtccattaagttcgctaagtcacagcgcgctgcgccagggcgtggcaatggtgcagcaagatccggtggtgctggcggataccttcctcgccaacgtgacgctggggcgtgatatctccgaagaacgcgtctggcaggcgctggaaaccgtgcaactggcggagctggcgcgtagcatgagcgacggtatttacacgccgcttggcgagcaggggaataatctctcagtcgggcaaaagcaactgctggcactggcacgcgtgttggtggagacgccgcaaatcctgatccttgatgaggcaacagccagcattgactccggtactgaacaggcgattcaacatgctctggcggcggtgcgtgaacatactacgcttgtggtgattgctcaccgcttatcaactattgttgatgccgacaccattctggtgcttcatcgtgggcaagctgtggagcagggcactcaccagcaactgctggcggcccagggacgctactggcagatgtatcaactgcaacttgcgggcgaagagctggcagccagcgtgcgtgaagaggaatcattgagcgcctgaatagcgcaatatttcatcgttggtgcaaaaatgtaacgcactgtgcactgtcatagtgcgttttcattttcaatcttcttaacttcctgctctctttctcgtttttcatttctggcacaccgcttgcaataccttcttcgtgtagcagaaccattaccgaattctgaccggaggggatctatgaagctggtgaccgtgataatcaaaccattcaagctggaagacgttcgtgaagcgttatcttccattggtattcagggcctgaccgtcaccgaagtgaaaggtttcgggcgtcagaaagggcatgccgagctgtaccggggggcggaatacagcgtcaacttcctgccaaaagtaaaaattgatgtggcgattgctgatgaccaactcgatgaagtgatcgatatcgtcagcaaagcggcttacaccggaaaaattggcgacggcaaaatcttcgtcgctgaattgcaacgcgtcattcgtattcgtaccggcgaagccgacgaagcggcgctgtaatctctggcacacagcaacaggaacgaaaaatgaagatagcaacgataaaaactgggcttacttcactggcgatgctgccgggactggtaatggctgcacctgcggtggccgataaagccgacaatgcgtttatgatgatttgtactgcgctggtgctgtttatgaccgttccggggattgccctgttttatggagggctgattcgtggcaaaaacgtgctgtcgatgctgacgcaggtgaccgtgacgtttgcactggtctgtattctctgggtggtttacggctactcgctggcgtttggcgaaggcaacaacttcttcggcaacattaacgggttgatgctgaaaaacattgaactgacggcggtgatgggcagcatttatcagtatatccacgtggcgtttcagggatcgtttgcctgcattaccgtaggcttgatagttggggcgctggcggaacgaatccgcttctcagctgtgttgatttttgtggtggtatggctgacgctctcttacattccgattgcgcatatggtctggggcggcggtttgctggcttctcacggggcactggatttcgcgggtggcacggtggtgcatattaacgccgcaatcgccggtctggtgggcgcgtatctgataggcaaacgcgtgggcttcggtaaagaggcgtttaaaccgcacaacctgccgatggtcttcaccgggactgctattctctatatcggttggtttggctttaacgccgggtcagcgggcacggcgaatgaaatcgcggcactggcatttgtgaatactgtggtcgcaactgcggcggcaattcttggctggatcttcggtgaatgggcgctgcgtggtaagccttcactgctgggagcgtgttctggcgcgattgccggtctggtcggcgtgacgccagcctgtggttacattggggttggcggcgcgttgattatcggcgtggtagctggtctggcgggcttgtggggcgttaccatgctcaaacgcttgctgcgggtggatgatccctgcgatgtcttcggtgtgcacggcgtttgtggtattgtcggctgtatcatgaccgggatttttgccgccagctcgctgggcggtgtgggcttcgctgaaggtgtgacgatgggccatcagttgctggtacagctggaaagcatcgccattacgattgtctggtctggtgtggtggcatttatcggctacaaactggcggatctgacggttggtctgcgtgtaccggaagagcaggagcgagaagggctggacgtcaacagccacggcgagaatgcctataacgcgtaacaagcactgcaaaaaacagccggacggttttcacctccggctatttttttaattgtgattacgcatcaccccttcctgaacggtcgaggcaaccagcacgccgtcctgggtataaaactcaccgcgcacaaagccgcgtgcgctggacgccgaggtgctttccacgctatacagcagccattcattcaaattaaacgggcgatggaaccacatggaatggtcaatggtggcaatctgaatccccggttcgagaaaaccgatgccgtgcggctgtagagctaccggcaggaaattaagatcagaagcataaccgagcagatactgatgaacgcgcagatcatccggcacgctaccatttgcgcggatccacacctgacgatgcggttctgcgacgtgccctttcagtgggttatgaaactccaccggacggacttcaagcggacgatcgctgatgaatttatctttcagcactggcggcagcaggtgcgccagcgattgggcgatttgcgtttctgaaggcaggccatcaggcgctggcgcggacggcattgttttttgatgttcgaaacccgcttctggtgcctggaaagaggcagtcatataaaaaatcggtttgccgttttgaatagcagaaacccggcgggcgctgaagctgttaccgtcacgcagcgtttcgacatcataaataatcggcttcttactatcgccagggcgaagaaagtagctgtgaaaagaatgtaccagccgctcgtcagggacggtctcttttgcagcatacaaggcctgacccacgacctggccgccaaatacctggcgtaaacctaaatcttcactctggccgcgaaagagtccttcctcaattttttccagatttaacaatgtcagtaaattttttagcgcctgactcatataactctccagtaacaaagctgccgcagcaagccaaagtgagttgagtataacgcaaatttgccactggtccgatgggtgcaatggtctgaattacgggctaattacaggcagaaatgcgtgatgtgtgccacacttgttgacgttactattttgttaaccactcttccggcgaggaaagttagcccgctggtgcattgataataaggagaagtgaatgaaactcgtgcacatggccagtggtttagcggttgcgattgcgttggcggcttgcgcagataaaagcgcggatattcagacgccagcaccggctgcaaatacgtctatttcagcaacacaacaacctgctatccagcaaccgaatgtctccggtaccgtttggatccgtcagaaagtcgcactgccgcctgatgccgtgctgaccgtgacactttctgacgcgtcgttagccgatgcgccgtcgaaagtgctggcgcagaaagcggtgcgtaccgaaggtaaacagtcaccattcagctttgttctgccatttaacccggcagatgttcagccgaacgcgcgtattctgttgagtgcggcgattaccgtgaatgacaaactggtatttattaccgataccgttcagccggtgatcaaccagggcggaactaaagccgacctgacattggtgccggtgcagcaaaccgccgtgccggttcaggctagcggtggcgcaacgactaccgtaccttcaacttcaccaacccaggtgaatccgtcttcggcagttccagctccaacgcaatattaagcgaagttaaccctctccgcccggagagggttagtagttccagcgataaagctgcaagtcgatttgcccgcttcccgacaccatcacaccttctgccagtaatgcctgtcgctgacgctgtaaatccggtccggtcagtgaaatggtgccgtggcgattaaccacccggtgccatggcaaggtgctgccttcggggagacgctttaacacaccgcctacctggcgcgcggcgcgcggcgatcccgccagtttcgccacatcaccgtaagtggtgacatagccttcgggaatagcggctacgatttgccagacgcgctggggaaatgaatcttctttttccatcttttcttcctgaggtaatttttcagcataatctggaaaaacgcccgagtgaagccgcattgcgcaagaaaccagcatctggcacgcaatgggttgcaattagccggggcagcagtgataatgcgcctgcgcgttggttctcaacgctctcaatgggggctctgttggttctcccgcaacgctactctgtttaccaggtcaggtccggaaggaagcagccaaggcagatgacgcgtgtgccgggatgtagctggcagggcccccacccatttctgcctcccaccgtttcgtcaaaaaatcccaacatggctaaactttaaccacaactgacgtcgcaagaattgtctggctgcgcagtacgcttcggaggtatgtctgatgaagtatgttgatggttttgttgttgccgttcctgccgataaaaaggatgcctatcgggaaatggccgctaaggccgcgccattatttaaagagttcggtgcgcttcgtattgtcgaatgctgggccagcgatgtaccggatggtaaagtgaccgattttcgtatggcggtgaaagcggaagagaatgaagaagttgtctttagctggattgaatacccttcaaaagaggtccgcgacgctgctaatcaaaagatgatgtcggacccacggatgaaagagttcggcgagtccatgccgtttgacggcaagcgaatgatctatggtggattcgaatcaatcatcgacgagtaggtagcgtgacgggctgtgcggcgtgccgtcagccctaaaattcacaaatgttgctcggcccagcgtaagaaatcctctttcggtaatgccttgctgtagagccagccctgaccgtagtgcacgccatgctggcgtagccactcttcttgtttactggtttcgattccctccgcaaccattttcagtttcagtgtttttgccatttcgatgatatgcggcgtgacatttttatattccagcgcatcaacgaaagatttatcgatcttcagaatgtcgacatccagatcctgtaaatagcttaaacttgaataccctgtaccaaaatcatcgagataaatttcatggcccgcctcccggtagcgagaaattatcggggcgctggttttcggatcggcaaactcgcgttcagtgagttcaagcgcgatctgtctgggattaacctgatagtgattgatcatttcacgcagcaattgcgggattttttccgaggtgagcacggtggattcaagattgatcgaaatatgctgctgaggatgctgacgcagccagtcgcccatatcttcaaagacgcttcttataatcagtagcgtcaatggctcagaaaggcccgtttgctgtgccagcggaataaaactatctggtgacaaccaactaccgtctgtctgcggccagcgcgccagtgcctcagcaccgacaattttgccattggctaaggagacaatcggctgatagtgcacgcaaatatcacgattttcgatagcatcctgcagccgatgatgcggtgactggatacggcgcaaaatacgcagcacaaacatcgctgccagcaggccaatcaccaacccgagcggtaaccaaataaagacttgccgatgccagcctttctgcaacattttcgttgaagcccaggtgatgatcgaaatattcatctccggtaagggcaggatatcgtaaatgattccattattttcgatatgctcaccgggtgttttttgtagcctggtaataattccctgagcaattttatcgctgctggttatgacaacgttatgggcattgccaataatggcggcatcaatttgccatgagctatagggaatgacatcaataaaggaagcagggtcgatcatgacgacataatgtgccgttcccatggcgaccatataacggataatgcctaaatcgctatgcgatgttaaccagacacgataaccatctttcgaaattttacctggctcggggaaggtatcgggcgggctttcatgctccagagacgaacactggggaacgttgttatcgatataaaccacttcctgaatatagcgataactgtaagatacccgacgcatttccatgagatgggcttcgctacaggcagcgccttgccatctttccagctcttgcagcgcatctttcccttgtgtcgccaccttattggcccgaatagcgacgcgggaggaatacgtattcagctcttcaataaatgatgtttctacctgctgatgggccagccagatgcttaagccgacaggcagcaatactgaaagaatcagtactcccgaaataaggctgaccagatgtcgtgttctcaccagcatatccttattaacacagtgtagggaaagtatatctgattgtggaaaaaggctggcaggagataaggaggtagagctggtatttcctgaagtgatgggtggaagcgatcgttgtcatttgaccaggcgtagagctttacgcctggtatgtacccctaacttaagatgttgattcggcgcgagcgagggtaaaaatatcgtaaaaagatagttcacctttacggacgatcattttttgcagttgttctttatgaacatccgtgacacgcggagagttcaagatggcttcaaccagcgcggcaggtacaaagcgcgtgttgtaccattcgccgttatagcaaacgcggaaatccagcacgtcgatatcttcatagcggtagcgtgggtagacatcgaaaaagaagaaaccattaagcaggataaataatacaaccagtagccagacagagcctgaaagcgtttcggactgcaacatcaccgccagggtggcaaaaaaagcaacgtacataccgataaacagccccggatgtttacggataaaactgatactaaagcggggtttgttgtcgcgtttttcgcgggtattcagagactcaatcgtttcggtcagcaggcgttgtatttcggtcatcgtttgccttcgtgatatctgcaactttccagggaacaccctattttaacgtgggaatagtagaggggaagtaacagatttgccacgattttgcataacagttgagaaaagctggttacaattttttaatgattctggctggattaccgcccacgacaacgttgtccgggacatcttttgtgacaactgcacctgaggctaccacgacgttatcaccaatggtcacaccagggttaatgactgcacgtccgccaatccagacgttattaccgatggtgacgggtttccccagttcagcaccgctattacgtgctacagggtcgatgggatgtgttgccgtgtagatatgaacgcctggtgccaacatacagttatcaccaatgcgaatagggcagacatcaagcatcacgcaatcgaagttggcgaaaaaattattgccgagaaaaatgttatagccatagtcacagcgaaacgttggctcaatataagcctctgtcacctgaccgaataaatcagcaagaatttgctggcgtaatgtgtgctcttccgccagggaatgattgtatcggtgaataagccgacgagctcgcaggcgatcgcgagataacgcctcatctgccgagtgatacaactcaccagcaatcatcttttctttttctgtgctcattactgacttccggttgctgaaaatgcggcaacacagtaagacgaaaagtcagtgaagagaacgttcccattacatctgtgtgatgaagatcacatagggtatgtcttcatggcgaaaaaagtgcaaaattcttaataaacagccagttatagctccgaaagtgagttatttattagcgaataaatttccatactgaggaagggatcttgtcgtacagtttattcatggtcaattcggcgaggcggtgatctgcggctgagtaaaataccgccagttcattatctgataattcgtatttatttttctcgataacacgctccagcgtgtcaattgtctggcaacgacgtaaacgcattaaataatcggttttcgttaaaggtttttcggacatacttctacccatggttgtaataattctaacaagataaactcgcaggattctctttcgtcgcattgacaaaacaacggaatagtcgattacctgacttccgccatttctgaagatcctgcatattaataccataactactgaacaacataaaggtgtcatccagatattcgtcgatctgctcaatgagcttattgtcttcattatacttaattttgtaattaagtgcgaaggtcgcaatatgctcaatcagttcattcaactggaggttgatcgccgaggttgggtcgttaacccagccatgattgctttcttcaaggtttgcaaggcagtcatgatacagggtttcacagagaaacttaagctgtgcgatatcatgtcttttgggtgagtattcatccataacgcgtccccttcttagcggttgaactaacggacacctttcgggatggaaaaaacttactgacctggacttgccctctcgtttgttagcttaactataagccactctttgtaggttttcatcgcattattacgaaaaattacaattaggaaggaagcgggacaggactcactttttcatgctagcaccaacccgcagcaggtaaaagcagtttgctcgaactgttcataacatttcagaattatcgccagaagaaattggtgacactaataccaggattgctctgaatatgacgtaataaccgaggaatgaataaagaattaccgcaaataattaagaatagcctctaaatggttatggattattaaatctattagcgctacttaatataaattaactaacaatcagtattttttatgaattttatacgtggttaatactggttttcgtatgagatcctgagttggtggttcaatactccttaatgttcgtaggttatgcataaaaaaggccgcttgcgcggccttagtgattacacgttgtatcaatgatgatcgacagtatggctgtgctcgatatcttcattcttgcggctaaagcggcggcgaaccaccacaaagaataccggaacgaagaagattgccagtaccgttgcggtcaccatcccgcccattacaccggtacctactgcgttctgcgcgccggaaccagcaccagtactgataaccagcggcataacgccgaggataaacgccaacgaggtcatcaggattgggcgtaaacgcatccgcaccgcatcaagcgtcgcttcaatcagacctttaccttctttatccatcaagtctttggcgaattcgacgataagtatcgcgttcttcgccgacaaaccaatggttgtgagcaggcctacctggaagtaaacgtcattggtcaggccacggaaggtggcagccagcaacgcaccgataacccccagcggaacgactagcataacggagaacggaatcgaccagctctcgtacagcgcagccagacacaggaacacgacaatcaacgaaatcgcgtacagtgaaggtgcctggttgccggagagacgttcctgataggacattcccgtccagtcatagccaacaccggtaggcagtttgctcgccagttgttccatcagctccattgcttcaccggtacttttacccggtgccgcctggcctaagatttccatagatggcaggccgttgtaacgttccagacgcggcgaaccgtactcccaacgagaagaggagaacgccgagaacggcaccatctgaccatcagcagcacgaacataccagtcgccgatatcatccggcagcatacggtatttcgcttctgacatgacgtaaactttcttcacacgaccgcggtcgataaagtcgttcacatagctaccgccccatgcagcgcccagagtggtgttaatgtcgttgatagaaacacccagcgcctgcgctttttcctggtcgatatcaatcttaaactgcggggtatcttccagaccgtttggacgtacgctggtcaacatatcagggtgcttcgctgcttctgcaagcaactggttacgcgcctgagtcagtttttcgtgaccaaggcctgcctggtcaatcagctcaaagtcaaagccggttgcggtacccagttccacgattgcgggcaggttaaaggcgaaaaccatcgcatctttgatttgcgagaaagcacgtgttgcacgcatggtaatcgcttcaactttgttttcttcgcccggacgatcggcccagtccttcaaggaaacgaacgcaataccggtattctgaccacgtcccgcaaagccgaagccgttaacggcgaacaccgactcaacgttgttcttttctttggtcagatagtaattcgttacctcattgagcactttctgcgtacgttcctgcgttgcacctgctggcagctgaaccatggtcataaatacgccctggtcctcatctggcaagaaggagcttggcagacgcacgaacagataggccataccgaccacgatgatcagatacagcaccaggtaacgccccgtactgcgcagaataccgcctacgctgtcggtgtagtggtgcgtgctcttctcgaacatgcggttaaaccagccgaagaagccttttttaccttccccgtgatcgcctttggcaatcggtttcagcatggtggcacaaagagccggagtcaggatcaacgccaccagtaccgacagcgccattgctgaaacaatggtaatagagaactgacgatagatagcaccagtagaaccgccaaagaaggccatcggtacgaataccgccgacagtaccatcgcgataccgaccagagcgccctgaatctgccccatcgacttacgggtggcttcttttggcggcaaaccttcttccgccatcacacgctcaacgttttctaccacaacgatggcgtcatccaccaacaggccgatggcgagcaccatcccgaacattgttagcgtgtttatcgagaagccaaaggcggcaaggacggcaaaggtcccgagcaataccaccggtacggcaatggtcggaatcaacgtcgcgcggaagttctgcaagaacagatacattaccaggaacacgaggatgatcgcttcgaccagcgttttaaccacttcgtgaatagagattttcacgaacggtgtggtgtcatacgggtaaacaattttcagacccgacgggaagaacggttccatcttcgccagttcagcacggattgccgcagcggtatccagcgcgttcgcaccggtcgccagcttgatccccagaccggaagccggttggccgttaaactctgcgatgatgtcgtagttctcaccacccagctcaattttcgccacatcacgcagtagcacgcgggaaccatcctgattcactttcagcaggattttgccgaactcttcagtagaggtcagacgcgtctgagcaataatagaggcgttaagctgttggcctttcaccggcggcgtaccaccgagctgaccagctgcaacctgagcgttctgtgctttgatggcggtaatgacatcaaccggcgttagctggaatttgttcagttcattcgggttcatccagatacgcatcgcgtactgtgaaccgaacaactgaacgtcacccacgcccgacgtacggctgatggcatctttcatattcgctgccacgtagtcagagatatcctcctgcgtcatagtgccatcggtgttgataaccccgacaaccatcaggaagctgctggatgatttctcaacgctcaccccttgctgctgaacttcttgcggcagcaacggcatcgccagctgcagtttgttctgcacctgaacctgcgcgatatccgcatcagtaccagactcaaaggtcagggtgatctgcacggtacccgtggagtcactgttagaggacatgtacatcaggttatcgataccgttcatattctgttcgataacctgtgtcaccgtgtcctgcactgttttcgcatcagcgccagggtaggaggcggagatcgttactgccggcggtgcaatcgtaggatattgcgccaccggcagtttgaggatcgccagcccccctgccaacatgatgataatggcgatcacccacgcaaaaatcgggcgatcgataaagaaattaggcatgtcttaacggctcctgtttaagttaagacttggactgttcaggctgagcaccgcttgcggcttgctggttattatcagcggtaacttcttgtgcttttacctggacaccaggacgcactttctgcagcccacttattactacgcgatcgcctgctttcagaccttctgtcaccagccacttatcgccgatagcctggcttgcaacgatcggacgggtttccactttgtcatccgcgccaaccaccagtacggtggcatcgccacgcggcgtacgggttacgccctgttgcgggactaaaatagcgtttggattaagcccttcttccagacgtgcacgcacgaacatacccggcagcagagtgtgatccgggttcgggaagatagcgcgtagggtgatagacccagtggtctgatcaacggtaacgtcagagaattccagcgtaccgtcctgcgggaacttaatgccgtcactggtgatcagcgacactttggctttgccgttctcttgtttcagcgtgccattcgccagttcctgtttcaggcgcaggaagtcgttgctggactgggtcacatcaacgtagatcggatcaagttgctgcacggttgccagcgcagtcgcctgaccgttctgtaccaatgcgccttccgtcacgtttgacttaccaatgcgaccactaatcggagaggtaactttggtgtaagccagattgattcgcgcagtttcaacggcagctttcgccgcagttaccgcagcattcgcctgttgcgcatcagccagagcctgatcgtactcttgcttactgatgtactgagtaccgagcaatttctgataacgattcaccgtcaattgcgcgatattggctgcagcctgggctttcgccagatcacctttcgcactgtcgtatgccgcctgataggtcgcaggatcaatctgatagagagagacacctgcttcgatgtcgctaccttctttgaaattacgcttcaggataatcccgctaacttgaggacgaacttctgcgatccggtaggcactggtgcgacccggaagctcggttgtgatctgcagaggttcagttttgactgttactacgccaacggcgggcatctgctggccaccttgttgggcctgtttgtcgtcacatcctgttagggctaagctgcctgagagcatcagaacgaccgccagaggcgtaaaccctctgtttttgttcatatgtaaacctcgagtgtccgatttcaaattggtcaatggtcaaaagttaataaacccattgctgcgtttatattatcgtcgtgctatggtacatacattcacaaatgtatgtaaatctaacgcctgtaaattcacgaacatatggcacgaaaaaccaaacaagaagcgcaagaaacgcgccaacacatcctcgatgtggctctacgtcttttctcacagcagggggtatcatccacctcgctgggtgagattgcaaaagcagctggcgttacgcgcggtgcaatctactggcattttaaagacaagtcggatttgttcagtgagatctgggaactgtcagaatccaatattggtgaactcgagcttgagtatcaggcaaaattccctggcgatccactctcagtattaagagagatattaattcatgttcttgagtccacggtgacagaagaacggcgtcgattattgatggagattatattccacaaatgcgaatttgtcggagaaatggctgttgtgcaacaggcacaacgtaatctctgtctggaaagttatgaccgtatagaacaaacgttaaaacattgtattgaagcgaaaatgttgcctgcggatttaatgacgcgtcgcgcagcaattattatgcgcggctatatttccggcctgatggaaaactggctctttgccccgcaatcttttgatcttaaaaaagaagcccgcgattacgtcgccatcttactggagatgtatctcctgtgccccacgcttcgtaaccctgccactaacgaataaccctgaatctgactccaggaattttcctggacattttcgtcgttgctattctggttcactgcgtcgtgatattcttgcggtttgactttttcaggtcgttcttcaggttcagaaaccttcattcatcatgactatgttccagtattacaaacgatcacggcattttgttttttcagcatttattgcttttgtttttgtcttgttatgccagaacacggcgtttgcacgggcgtcatcgaatggtgatttaccgacaaaagcggacctgcaggcacaacttgactcactgaataaacaaaaagatctttctgctcaggacaaactggtgcagcaggatctgacagatacattagccaccctcgataaaatcgatcgcgtaaaagaagagacagttcagctacggcaaaaagtcgctgaagcgccggaaaaaatgcgccaggcgacagcggcgttaacagcacttagtgatgtcgataacgacgaagaaacgcgcaaaattctgagcacgctttcgttgcgccagctggaaactcgcgttgcccaggcgctggacgatttgcaaaacgcacaaaatgatctggcctcttataacagccaactggtttcgctacagacgcagcccgaacgcgtacaaaatgcgatgtataacgcttcgcagcagctgcaacaaattcgcagtcgtctggatgggactgatgtcggcgagactgccttacgtcccagccagaaagtgttaatgcaggtccagcaggctttgctgaatgccgagattgaccagcagcgtaaaagcctggaagggaacactgtcttgcaggataccttgcaaaagcagcgtgattacgtgacggcgaacagcgcccgtctggagcaccagttacaactgttgcaagaagcggtaaacagcaagcgcctgactttaaccgaaaaaacggcgcaggaagctgtctccccggatgaagccgcgcgtattcaggctaatccgctggtgaagcaggaactggaaattaaccagcagttaagtcagcgtctgattaccgcgactgaaaacggtaatcagttgatgcagcaaaacattaaagtcaaaaactggctggagcgtgcgctgcaatcggaacgtaatattaaggagcagattgccgttctgaagggcagtctgctgttgtcacgtatcctgtaccagcaacaacaaacactcccctcggcagatgaactggaaaacatgaccaaccgcatcgcggatttgcgtctcgaacagtttgaagtcaaccagcagcgtgacgcgctgttccagagcgatgcgttcgtcagcaaactggaagaaggtcacaccaacgaagtcaacagcgaagttcacgatgcattattgcaagtagttgatatgcgtcgcgaattgctggatcagcttaacaaacagttgggtaaccagctgatgatggccattaacctgcaaatcaaccagcagcagttaatgagtgtgtcgaaaaacctgaaatccatcctgacgcagcaaattttttgggtgaacagtaaccgcccgatggactgggactggattaaagcgttcccgcaaacgctgaaagatgaatttaagtcgatgaaaatcacggtgaactgggaaaaagcctggcccgccgtattcatcgccttcctcgctggtttgccgctgctgttgattgccgggctgatccactggcgtctgggctggctgaaagcgtatcaacaaaaactggcttccgctgtgggttccctgcgtaacgacagccagctcaacacaccaaaagcgatccttatcgacctgatccgcgcactgccggtgtgcctgattattctcgctgtcggcctgattctgctgactatgcagctcaatatcagcgagttattgtggtcgttcagcaaaaaactggcgattttctggctggtatttggcctgtgctggaaagtgctggagaaaaatggtgttgccgtgcgtcactttggtatgccggaacagcagaccagccactggcgtcggcaaattgtccgcatcagcctcgcgttgctgccgatccatttctggtctgtggtggcagaactctccccgctgcatctgatggatgatgtgctggggcaggcgatgattttcttcaacctgctgctgattgccttcctggtgtggccgatgtgccgcgaaagctggcgtgataaagagtcgcacaccatgcgactggtcaccattaccgtgctgtcgattatcccgattgcgttgatggtgctgaccgccacgggttacttctacaccacgctgcgcctctccgggcgttggattgaaaccgtttatttggtgatcatctggaacctgctgtaccagacggtattgcgcggcttaagcgtagcggcgcggcgtatcgcctggcgtcgtgcactggcgcgtcggcagaatctggtgaaagagggcgcagaaggtgccgaaccgccggaagaacccaccattgcgctggagcaggttaaccagcagacgctgcgtattaccatgttgctgatgtttgcgctgttcggtgtcatgttctgggcaatttggtctgatttgatcaccgtgttcagctatctcgacagcattacgctctggcattacaacgctactgaagctggtgctgcggtggtgaaaaacgtcaccatgggcagtctgttgtttgcgattatcgcctcaatggtggcctgggcgttgattcgcaacctgcctggtttgctggaagtgctggtgctctcgcgactgaatatgcgccagggcgcgtcgtatgccattactactatccttaactacatcattattgccgttggtgcgatgacggtgttcggatcgctgggcgtctcgtgggataaactccagtggctggcggcagcattatccgtaggtcttggttttggtttacaagagatcttcggtaacttcgtttccggtttgatcattctgttcgaacgtccggtgcgcataggcgacacggtaaccattggtagcttctcgggtacggtcagcaagatccgtattcgtgcgacaacgattaccgatttcgatcgcaaagaagtgattatcccgaacaaagcgtttgttaccgagcgtctgatcaactggtcgttgactgacacgactacgcgtctggtgatccgtctcggcgtggcctatggctccgatctggaaaaagtgcgtaaagtgttactgaaggcggcgactgagcacccaagggtgatgcacgaaccaatgccggaagtcttctttacggcgtttggtgccagcacgttggatcatgagctgcgtctgtatgtgcgtgaactgcgtgaccgtagccgtacagtcgatgagctgaaccgtactatcgatcagctgtgccgtgaaaacgacatcaacattgcctttaaccagcttgaagtgcatctgcacaacgagaggggcgatgaagtgacggaagtgaaacgcgactacaaaggcgacgatccgacgccagcggtagggtaataaccaaagggggcgacatttagttgccccgagattactaacaaagtgcgcgttgttcatgccggatgcggcgtgaccgccttatccggcctacgaaaccgcaagaattcaatatattgcaggagcggtgtaggcctgataagcgtagcgcatcaggcagttttgcgtttgcccacaatcttaggggacatttagcggccccatttatttctcacttttccgcctcatcatcgcgcgttaatttcttttcataatcgcgttttacaatatccagcgcgcgcagcacggtgcgggctgggatctgattttcttccagtagcacaatcaaatcgacggccagtttgacatcgtcaggggcattttccagtgacatactctctccattgctagcgggttaaacgcgctaacctgttttcgattttttccagcgcatggcggcagcgtgccaggcgcgcttcataggcttccacttcacgatgcagcgtctgctgttccacgagagcggtcgctcgcgccagacgggctctacgttcggcaaccatctcacgtagccgccgctcaaaatcctgatgctgaatacgtttacgctgccagcgggcaattttcggtggtgcgctatcccactcgcgtagcgaccaggctgtggcttcacgcgctatagcctccagttgcgccgccagatgttctgccagccaggcgacttgcggcagctgttgctgctcaaccgcatgacgaagcgcagccaggttatcgcccgcctcatcgagacaagcctgtagtgttgtcgcacgggtctgaaaaaggtgcctgtcaaaacgggcacttagcgtggcaaattgcgctaccggggcacaacgctgacgcagcgtggcgagctgtccttccagtttttccagtagcagggtggttttcacgataagacctcaatgaaaatgataattgttatgctaaagtagccactctgtaagctgacaacactcaatatgcaacgaatcattttaatcatcattggctggctggcggtagtgctgggtacgctgggcgtggtattaccggtattaccgacgacgccgtttatcctgctggcggcctggtgctttgcccgttcttccccgcgctttcacgcctggttgctgtaccgctcatggtttggcagttatctacgtttctggcagaaacatcatgcgatgccgcgcggcgcaaaaccacgggcgattttgcttattttgattacgtttacgatttcgctgtggttcgtccagatgccgtgggtgcgcatcatgttgctggtaattctcgcctgtttgcttttttatatgtggcgaattccggtgattgatgaaaagcaagaaaagcactgaagcacaacaatcgcagttgcaattattgcgtacagccagtacattctggcgttttcgagcacaggcgcaggcggtcaaaggttaaacaactgttacttttgatacgttcaaaacgcgccgtgagtaccaccgtaacaagcaggcatacacttatgaccgcgactgcacagcagcttgagtatctcaaaaatagcatcaaaagcattcaggactacccaaaacccggcattcttttccgcgatgtcaccagcttactggaagacccgaaagcttacgctctcagcatcgacttgctggttgagcgttacaaaaatgcgggcattaccaaagtggtcggcaccgaagcgcgtggcttcttgtttggcgctccggtagctctgggtctgggcgttggctttgtaccggtccgtaaaccgggcaaactgccgcgtgaaaccatcagtgaaacttacgacctggaatacggcaccgatcagctggaaatccacgttgatgccatcaaaccgggcgacaaagttctggtggtggacgatctgctggcaaccggcggcactatcgaagcgaccgttaaactgatccgtcgtctgggtggtgaagtagctgacgctgcgttcattatcaacctgttcgatctcggcggcgaacagcgtctcgaaaaacagggcattaccagctacagccttgtcccgttcccgggccattaattatcgtcagtcttgcgctgctcacgctacgggcagcacaagatgtgcattcagcctcgccgttctgacggggctgtgttagcattcccccttcgtgaatccaccttccagcgtttcagagcctgccaatgagttatcaggtcttagcccgaaaatggcgcccacaaacctttgctgacgtcgtcggccaggaacatgtgctgaccgcactggcgaacggcttgtcgttagggcgtattcatcatgcttatcttttttccggcacccgtggcgtcggaaaaacctctatcgcccgactgttggcgaaggggctaaactgcgaaaccggcattaccgcgacgccgtgcggcgtgtgcgataactgtcgtgaaatcgagcaggggcgctttgtcgatctgattgaaatcgacgccgcctcgcgcactaaagtcgaagatacccgcgacctgctggataacgttcagtacgctccggcgcgtggtcgtttcaaagtttatctcatcgacgaagtgcatatgctgtcgcgtcacagctttaacgcactgttaaaaacccttgaagagccgccagagcacgttaagtttttgctggcgacgaccgatccgcagaaattgccggtgacgattttgtcacgctgtctgcaatttcatctcaaggcgctggatgtcgagcaaattcgccatcagcttgagcacatcctcaacgaagaacatatcgctcacgagccgcgggcgctgcaattgttggcacgcgccgctgaaggcagcctgcgagatgccttaagtctgaccgaccaggcgattgccagcggtgacggccaggtttcaacccaggcggtcagtgcgatgctgggtacgcttgacgacgatcaggcgttatcgctggttgaagcgatggtcgaggccaacggcgagcgcgtaatggcgctaattaatgaagctgctgcccgtggtatcgagtgggaagcgttgctggtggaaatgcttggtctgttgcatcgtatcgcgatggtacaactttcgcctgctgctcttggcaacgacatggccgccattgagctgcggatgcgtgaactggcgcgcaccataccgccgacggatattcagctttactatcagacgctgttgattggtcgcaaagaattaccgtatgcgccagaccgccgtatgggtgttgagatgacgctgctgcgcgcgctggcgttccatccgcgtatgcctctgcctgagccagaagtgccacgccagtcctttgcgcccgttgcgccaacggcagtaatgacgccaacacaggtgccgccgcaaccgcaatcagcgccgcagcaggcaccgactgtaccgctcccggaaaccaccagccaggtgctggcggcgcgccagcagttgcagcgcgtgcagggagcaaccaaagcaaaaaagagtgaaccggcagccgctacccgcgcgcggccggtgaataacgctgcgctggaaagactggcttcggtcaccgatcgcgttcaggcgcgcccggtgccatcggcgctggaaaaagcgccagccaaaaaagaagcgtatcgctggaaggcgaccactccagtgatgcagcaaaaagaagtggtcgccacgccgaaggcgctgaaaaaagcgctggaacatgaaaaaacgccggaactggcggcgaagctggcggcagaagccattgagcgcgacccgtgggcggctcaggtgagtcaactttcgctaccaaaactggtcgaacaggtggcgttaaatgcctggaaagaggagagcgacaacgcagtatgtctgcatttgcgctcctctcagcggcatttgaacaaccgcggcgcacagcaaaaactggctgaagcgttgagcacgttaaaaggttcaacggttgaactgactatcgttgaagatgataatcccgcggtgcgtacgccgctggaatggcgtcaggcgatatacgaagaaaaacttgcgcaggcgcgcgagtccattattgcggataataatattcagaccctgcgtcgattcttcgatgcggagctggatgaagaaagtatccgccccatttgatcgtaagcacagcttacgttcgtcatccttaacgtgattgagagagaaacctatgtttggtaaaggcggtctgggtaacctgatgaagcaagcccagcagatgcaagaaaaaatgcagaaaatgcaggaagagatcgcgcagctggaagtcaccggcgaatctggcgcaggtctggtaaaagtgaccatcaacggtgcacacaactgccgtcgcgtagagatcgacccgagcctgctggaagacgacaaagagatgctggaagacctggtggctgcagcattcaacgacgcagcacgtcgtattgaagaaacgcagaaagaaaaaatggcctctgtatcctccggaatgcagctgccgcctggctttaagatgccattctgatgcaaaccagcccgctgttaacacagcttatggaagcactgcgctgtctgccgggcgttggcccgaagtcggcgcagcgtatggcgttcacgctgcttcagcgcgatcgtagcggcgggatgcgtctggcgcaggcgctcacccgggcgatgtcggaaatcggtcactgcgccgattgccgcaccttcaccgaacaggaagtctgtaacatctgttcgaatccacgtcgtcaggaaaacggtcaaatctgcgtggtggagagtccggcggacatttacgccattgagcagacggggcagttttcaggtcgttattttgtgttgatgggacacctgtcaccgctggacggcatcggtcctgatgatatcgggcttgatcgtctggaacagcgtctggcagaggaaaaaatcactgaagtgatcctcgccaccaaccccacggttgaaggtgaagctaccgctaactacattgccgagctttgtgcgcaatatgacgtggaagccagccgaatcgctcatggcgtaccggttggcggcgaactggaaatggtcgatggcaccacgctgtcacactcccttgccgggcgtcataagattcgtttttaagcaaacgagagcaggatcacctgctctcgcttgaaattattctcccttgtccccatctctccctcatcctgtttttaaccttaaaatggcattattgaggtagacctacatgaaaggacaagaaactcgtggttttcagtcagaagtgaaacagcttctgcacctgatgatccattctctctattccaataaagaaatcttcctgcgtgagcttatctctaacgcctccgatgcggcggacaagctgcgtttccgcgcgctttctaacccggacctgtacgaaggtgatggtgaactacgcgttcgtgtctctttcgataaagacaagcgcacgctgaccatctccgataacggcgtggggatgacccgcgacgaagtgattgaccatctggggactatcgctaaatccggcaccaaatcattcctcgaatccctgggttctgaccaggcgaaagacagccagctgatcggtcagtttggtgttggtttctactctgcgtttatcgtggctgacaaagtgaccgtgcgtactcgcgcggcaggcgaaaaaccagaaaacggcgtcttctgggaatcggctggcgaaggtgaatacaccgttgccgacatcactaaagaagatcgtggtactgaaatcaccctgcatctgcgtgaaggcgaagacgagttcctcgatgactggcgtgtgcgttccatcatcagcaaatattccgaccatatcgcgctgccggtagagatcgaaaaacgcgaagagaaagacggcgaaaccgttatctcctgggagaaaatcaacaaagcgcaggcgctgtggactcgtaacaagtcggaaatcaccgatgaagagtacaaagagttctacaaacacatcgcccacgactttaacgatccgctgacctggagccacaaccgcgttgaaggtaagcaggagtacaccagcctgctgtacattccgtctcaggcaccgtgggatatgtggaaccgcgatcataaacacggtctgaaactgtatgttcagcgtgtgttcatcatggacgacgcagaacagttcatgccgaactatctgcgcttcgtgcgtggtctgattgactccagcgatctgccgctgaacgtttcccgtgaaatcctccaggacagcacggtaacgcgtaacctgcgcaatgcgctgaccaagcgtgtgctgcaaatgctggaaaaactggcgaaagacgacgcggaaaaataccagaccttctggcaacagtttggcctggtactgaaagaaggtccggcggaagatttcgctaaccaggaagcgatcgccaaactgctgcgttttgcttctacccataccgattcttctgcgcagaccgtgtctctggaagactacgtttcccgcatgaaagaagggcaggagaaaatctactatatcaccgcagacagttacgcggcagcgaagagcagcccgcacctggaactgctgcgtaagaaaggcatcgaagttctgctgctttccgaccgcatcgatgagtggatgatgaactatctgactgagttcgacggtaaaccgttccagtctgtgtctaaagttgacgagtcgctggaaaaactggctgacgaagttgatgagagcgcgaaagaagcggagaaagcactgactccgttcatcgaccgtatgaaagccctgctcggcgagcgcgtgaaagatgtccgtctgactcaccgtctgaccgatacgccagcgatcgtttcgaccgacgcggacgaaatgagcactcagatggcgaaactgttcgctgcggcgggccagaaagtgccagaagtgaaatacatcttcgaactgaacccggatcacgtactggtgaaacgtgcggcggatactgaagatgaagcgaagttcagcgagtgggtagaactgctgctggatcaggcgctgctggcagaacgcggtacgctggaagatccgaacctgtttattcgtcgtatgaaccagctgctggtttcctgatgtcatgccggatgaccttcgtgtcatccggcatttttcttttcttcatctgcactttccgcaaattatcttgccattaaccgtttcagcctcaggtgcctttcttgaggcaatcgcctgttggtggtatcgtttatcgctttttcaaaaaattcgacacattttaaggggattttcgcaatgcgtatcattctgcttggcgctccgggcgcggggaaagggactcaggctcagttcatcatggagaaatatggtattccgcaaatctccactggcgatatgctgcgtgctgcggtcaaatctggctccgagctgggtaaacaagcaaaagacattatggatgctggcaaactggtcaccgacgaactggtgatcgcgctggttaaagagcgcattgctcaggaagactgccgcaacggtttcctgttggacggcttcccgcgtaccattccgcaggcagacgcgatgaaagaagcgggcatcaatgttgattacgttctggaattcgacgtaccggacgaactgattgttgaccgtatcgtaggccgccgcgttcacgcgccgtctggtcgtgtttatcacgttaaattcaatccgccgaaagtagaaggcaaagacgacgttaccggtgaagaactgactacccgtaaagacgatcaggaagagaccgtacgtaaacgtctggttgaataccatcagatgactgcaccgctgatcggctactactccaaagaagctgaagcgggtaacaccaaatacgcgaaagttgacggcaccaagccggtggctgaagttcgcgcagctctggaaaaaattctcggctaatcaagccgccgcagatctgctctcgggcaggtctgctcatcctcctcaggcaatacctcttacagcaattagttcttcttcttcacttttccgctacaattatcaacaagttgaatcgataagaggcggtaatgcgtcaaactaaaaccggtatcctgctggcaaacctgggtacgcccgatgcccccacacctgaagcggtaaaacgctatctgaaacaatttttaagcgacagacgcgtggttgatacctcacggttgttatggtggccgttgctgcgcggcgtgattttgccgctgcgttcgccgcgtgtggcgaagctgtatgcctctgtctggatggaaggtggctcgccgctgatggtttacagccgccagcaacagcaggcgctggcgcaacgtttaccggagacgcccgtggcgctgggaatgagctacggctcgccatcactggaaagcgccgtagatgaacttctggcagagcatgtagatcatattgtggtgctgccgctttatccgcaatactcctgttcaacggtcggtgcggtatgggatgaattggcacgcattctggcgcgcaaacgtagcattccggggatatcgtttattcgtgattacgccgataaccacgattatattaatgcactggcgaacagcgtacgtgcttcttttgccaaacatggcgaaccggatctgctgttgctctcttatcatggcattccccagcgttatgcagatgaaggcgatgattacccgcaacgttgccgcacaacaactcgcgaactcgcttccgcactggagatggcaccggaaaaagtgatgatgacctttcagtcgcgctttggccgggaaccctggctgatgccttataccgacgaaacgctgaaaatgctcggagaaaaaggcgtgggtcatattcaggtgatgtgcccgggctttgctgcggattgtctggagacgctggaagagattgccgagcaaaaccgtgaggtcttcctcggtgcgggcgggaaaaaatatgaatatattccggcgcttaatgccacgccggaacatatcgaaatgatggctaatcttgttgccgcgtatcgctaaagctgagcggtaaagaactgagcgccgtcgcgaagagcctcgtcggcggttttcatcatccgtgaataatgcaaaaaggcgtgcagcgtgcctgggtagagtttgaactcacagggctgctgatgcgccgctaacgtctggtaaagcagacggctgtcatccagcagtggatcgaactccgccccggcaataaaacagggcggaacttcgcgagtgagatcattattaaacaggcagtaatatggcgactcgcggtccgcgtcgttgcttaaatacgcctcttcatacatctgcaaatcctgttgcgttaagccatcccagacaccacccaacagacgacgagtcacggaatcccgtaatccgtaaagcccataccacagcaaaacgcccgcaactttaccgcaatcgatctgtttatcgcgcaaccacaacgcactggcgagcgccagcatggcacctgcggaatcaccggcaaaaccaatgcgggacatattgatttgataatcctccgcctgctggtggaaataacaacaggcagccacaatttcctctatcgcttgcggaaaacgcgcttcaggtgaaagggtgtaatcaatgccaatcaccgtacattggctgtagcttgccagcaggcgcatgatgcgatcgtgggtatcgagattgccgagaataaaaccgcctccatgcaaataaaatagcgtcgccggcctatctggctgcggataaaagatacgtgttttcacctgcccatattttgttggaaccctgtaagctctggttgccatttctggagcgcccacattccagaatcggcgctcaagcgtgtaatactgtcgttgctcagcaatcgttcccgttgcaggccagggcggtaaatccggctgaagagtattcacaacggtcttcatttcagcagagataaggtccagaacgggtaatttgttttccggcttcatgcaaaaactcctttcaaattacgtcattgtaaggaaccactgccatgaaaatgcgatcccgcctgctgatattgaaactggctgtgtctcgcgcgctcccgtcagattgtgttaacattcgccgctcagttaaccacccgtaaaaacaaccatgaaatttcccggtaaacgtaaatccaaacattacttccccgtaaacgcacgcgatccgctgcttcagcaattccagccagaaaacgaaaccagcgccgcctgggtagtgggtatcgatcaaacgctggtcgatattgaagcgaaagtggatgatgaattcattgagcgttatggattaagcgccgggcattcattggtgattgaggatgacgttgccgaagcgctttatcaggaactaaaacagaaaaacctgattacccatcagtttgcgggtggcaccattggtaacaccatgcacaactactcggtgctcgcggacgaccgttcggtgctgctgggcgtcatgtgcagcaatattgaaattggcagctatgcctatcgttacctgtgtaacacctccagccgtaccgatcttaactatctacaaggcgtggatggcccaattggtcgttgctttacgctgattggcgagtccggggaacgtacctttgctatcagccccggccacatgaaccagctgcgggctgaaagtattccggaagatgtgattgccggagcctcggctctggttctcacctcttatctggtgcgttgcaagccgggtgaacccatgccggaagcaaccatgaaagccattgagtacgcgaagaaatataacgtaccggtggtgctgacgctgggcaccaagtttgtcattgccgagaatccacagtggtggcagcaattcctcaaagaccacgtctctatccttgcgatgaacgaagatgaagccgaagcgttgaccggagaaagcgatccgttgttggcatctgacaaggcgctggactgggtagatctggtgctgtgcaccgccgggccaatcggcttgtatatggcaggctttaccgaagacgaagcgaaacgtaaaacccagcatccgctgctgccgggtgctatagcggaatttaatcagtatgagtttagccgcgccatgcgccacaaggattgccagaatccgctgcgtgtctattcgcacattgcgccgtacatgggcgggccggaaaaaatcatgaacactaatggagcaggggatggcgcactggcagcgttgctgcatgacattaccgccaacagctaccaccgtagcaacgtaccaaactccagcaaacataaattcacctggttaacttattcatcgttagcgcaggtgtgtaaatatgctaaccgtgtgagctatcaggtactgaaccagcattcacctcgtttaacgcgcggcttgccggagcgtgaagacagcctggaagagtcttactgggatcgttaagttatcgtcggttcgtaggccagataaggcgttcacgccgcatctggcattttgctttcaatgcctgatgcgacgctggcgcgtcttatcaggcctacatatccgcgcctattatccggcaaccaccgtttacctcgtcaccacctcacccgccggtggcgtttccagcagttccagcatagtacgggcaatttcacgctcacccatcactacctgattcgcaccacgttcggtgatatacgccacttcatcgtcataatgggcgcgggcaataatctcaatatccggatttttcgcgcgggcagatgccacaatctcgcccgcttcatagccgttgggaatcgtcaggatcagccattttgcacattccagatgcgccagttgcataatttcttcgttcgccgcattgcccaatactgcgcggaccccgcgctcgcgcagctcatcaacacgagttcgtgacgtctcaatcaccaccagcggaatatcagaggcgagcaatttctcccccagcaggctgcctacacgaccgtaacccaccagtagcgcatggttgcaaatatccactgggatctgcttctcttcttcgattgcctcttccagcgtctgctcttccagcgtttcggtcttcgccagatatttttccagtagtgcgaacagtaccgggttgagcataatcgacaggatcgcccctgccagtaccaggttttgtccggcctgcggcagtaaattcaatgccattcctagtcccgccaggataaacgcgaactcaccaatctgcgccaggctggcggcgatggttaacgccgtgcgctgggagtgaccaaacaaacgcacaaggaacagggccgcgaccgatttaccaaacagaataattgccagcgtcgccagtactgccagcggttgctgaatcagaattaacggatcaaacaacatcccgacggagacaaaaaacagcaccgcaaacgcgtcgcgcaatggcagtgtatcgtgggcggcacggtgactcagttcagactcgttcagtaccatcccggcaaagaacgcaccgagtgcaaaggagacatcaaacagctctaccgcaccaaaggcaatccctaacgccagcgctagcaccgacagggtaaacagctcgcgggaaccggttgctgcgctgcgtgccataatccacggcaccagacggcgacctaccaacatcataatggcgataaatgcgatcaccttgccgatggtgatccccatatcgactgcaagagtggcaaagcccacatcgccctgttccatcattcctgctaccgcgggtagcaataccagcgtcaggaccatcaccaggtcttccacaatcaaccaaccgatggcgatttgcccacgctgactgtcaattaattgccgttcttcaagtgcgcgcagtaacaccacggtactggcggtggaaagacataagccgaacacgataccggtcattaacgaccagcccagcacggcggagagcgccatacccagcagcgtcgccacggctatctgggcgatcgcgccgggaatggcgatggactttaccgccatcaaatccttgagcgaaaaatgcaaaccgacgccgaacatcagcaaaataacgcccagttcagccagttccggcgcaagcttggtatcggcaacaaagcccggagtgaatggtcctgccagcacacccgctaacagatatcccaccagaggagaaatacgtagtttattggccagcatgccgaggataaaggcgagcacaaggccgccaacaatggtggtgataagcggggtggcgtgatgcattccgtctccttttcctggtggttattgtccatttttggccgggaaaaccaaaattacaggtaatagtttatgacaatttcattgatgatgtttatgaataattgttgaattttgcagaaaaatggaattagctgcaaaaaaagcacggatcggaaaacagaaggcggtttaacagaggaaaggcttatggcgactgtaaaacgatgcagccaaagtttgcctttggctgcaatgaaatcagtctttatgccggttatcaggcaggaatatggtcaacatccccaatagtggcaggaaagcacagattttatagactaactctatgctggtgtggtcggcgataagccccagaactgccgcccccagacctcccatgccgaaagcaaaaccgaaaaatagtccagaaaccataccgatacgtcccggaagcagctcctgggcatagaccagaatggcagagaatgccgaagcgaggataaatccaataatcaccgttaaaacccccgtccagtgcaggctggcgtagggtaaaatcagcgtaaacggcgcaacgccgaggatagagccccaaatcacatatttccgtccaattttatcccctacaggcccgccaatcaccgtacctgccgcaacggcaaacaggaaggcaaacaaatgaagctgagcattctggatagataatccgaatttttgcatcagataaaaggtgtaatagctgctgatgctcgccatatagaaatatttcgagaaaatgaggattaacagaatgctgaccgccagaacaactttattgcgcggcagtggattgataatcgtcgctttgggttttcctttattcattcggtgctgtgccgagtaccaacggctgatttgcgccaacaccacgatcgccagcagtgccgcaagcacaaaccaggcaacgttgcctttgccataaggcgcgataatcaccgccgccagcaaggggcccagggaactgccaaagttgccgccgacctgaaatatagattgcgccaggccatgacgcccgccggaagccatacgggccacgcgagaagattccggatgaaagaccgatgaaccggtaccgaccagcgccgctgccagcagaactgcgccgaaactgcccgccagcgccagcagcaccagaccacttaaggtaaagcacatgccaatcggcaacgaccacggcatcggatatttatcggtccagtagccgaccaccggttgcagtaacgaagaggcgagctggaaggtgagggttatcatgccaatctgcataaatgtcagagaaaattctgactgaagcagtggataaatcgccagaatcagcgattggatcatgtcgttcagcagatgtgagaggctgatagcacctaaaataccaaacgatgttcgggccttagtcgttgacgcagccgcgcccgccacaggctgggtttgttcactcattgccataggaaagtcactttttcagggttgcgatgtaaagaatgatcttatttgtgattattacccgactaacatacctgtatgcgctgcctgaaggaagtctcaacgcggaatacagaatttctaatctggatgcagatttatcttcaccggacgcagacttgtttatgatgtcgcgtcatactatttttcaacacgttgaaatcaggtcagggagagaagtatgaaattattgcagcggggcgtggcgttagcactgttaaccacatttacactggcgagtgaaactgctctggcgtacgagcaggataaaacctacaaaattacagttctgcataccaatgatcatcatgggcatttttggcgcaatgaatatggtgaatatggtctggcggagcaaaaaacgctggtggatggtatccgcaaagaggttgcggctgaaggcggtagcgtgctgctactttccggtggcgacattaacactggcgtgcccgagtccgacttacaggatgccgaacctgattttcgcggtatgaatctggtgggctatgacgcgatggcgatcggtaatcatgaatttgataacccgctcaccgtattacgccagcaggaaaagtgggctaagttcccgttgctttccgccaatatctaccagaaaagtaccggcgagcgcctgtttaaaccatgggcgctgtttaagcgtcaggatctgaaaattgccgttattggcctgacgacggatgacacagccaaaattggtaatccggaatatttcactgatatcgaatttcgtaagcccgctgatgaagcgaagctggtgattcaggagctgcaacagacagaaaagccagacattattatcgcggcgacccatatggggcattacgacaatggtgagcacggctctaacgcaccgggcgatgtggagatggcacgcgcgctgcctgccggatcgctggcgatgatcgtcggtggtcactcgcaagatccggtctgtatggcggcagaaaacaaaaaacaggtcgattacgtgccgggtacgccatgcaaaccggatcaacaaaacggcatctggattgtgcaggcgcatgagtggggcaaatacgtgggacgggctgattttgagtttcgtaatggcgaaatgaaaatggttaactaccagctgattccggtgaacctgaagaagaaagtgacctgggaagacgggaaaagcgagcgcgtgctgtacacccctgaaatcgctgaaaaccagcaaatgatctcgctgttatcaccgttccagaacaaaggtaaagcgcagctggaagtgaaaataggcgaaaccaatggtcgtctggaaggcgatcgtgacaaagtgcgttttgtacagaccaatatggggcggttgattctggcagcacaaatggatcgcactggtgccgactttgcggtgatgagcggaggcggaattcgtgattctatcgaagcaggtgatatcagctataaaaacgtactgaaagtgcagccattcggcaatgtggtggtgtatgccgacatgaccggtaaagaggtgattgattacttgaccgccgtcgcgcagatgaagccagattcaggtgcctacccgcaatttgccaacgttagctttgtggcgaaagacggtaaactgaacgacctgaaaatcaaaggcgaaccggtcgatccggcgaaaacttaccgcatggcgacattaaacttcaatgccaccggcggggatggctatccgcgccttgataacaaaccgggctatgtgaataccggctttattgatgccgaagtgctgaaagcgtatatccagaaaagctcgccgctggatgtgagtgtttatgaaccgaaaggtgaggtgagctggcagtaatccgaaagtgccggatgttcgcatccggcacaatgcttaatcgcgacgggcgatatcagcaaatttggcatcgagtatctttgccaggtcgcttgccgccagttcgatatccagaccgcgcttgccgccggaaacataaatagtggcaaattcttgtgcgggggcgtcgataatcgttggcagacgttttttctgccccagtgggctaatccctccaaccagatatcccgtcgaacgctgcgcgaccatcggatcggccatctcaactttcttggcacccagcgcttttgctacttttttaagatccagttgacctgcgaccggcgtaacggccacggcaaggtgtttcatatcaccgttcactgcgaccagcagcgttttgtagacctgatccggattcaaacctaattttttgacgacttcatcgccaaaattggtttcagccggatcgtgctcgtaggtatggatttgaaacgaaatcttgtttttttcgagtaatttaactgcgggtgtcatggtaattttcctgccttaaacaaaaaaacgaagcaagcatacgcctgatggcggtccaaaaaaaagagtcatcttgcctaagagtattggcaggatggtgagattgagcgacaatcgagttacaccgtcgcttaaagtgacggcataataataaaaaaatgaaattcctctttgacgggccaatagcgatattggccatttttttagcgcaacatctgcggcaaattcccttctccatacaggtgtagtgcaccgactgcgaccacatagcgccccggcggcatggcgcgtaatttatcccgccaggcgagatttcgctgatgcatcagcacatcgtacagcgactgactgaacgtattgggcagcgttatttcattattttgcggcggcgcattcaaccaccagctcatcatttgttgcagcaaccgtgcattggtgtgccagtgggtcagcgtgtcgtccagcagcgccagtccgttgtcagggagctggagcaacatggcaatctggttttcagccccttccagttcaatcacgggtttatgttgttgcttcgccgcctgcaatagctggtaatcgataccgtattctgcccgcagccccagtttttgtgcctgcgtcgcctgaagaaccatcgcgatttgccacagcggttgagtagaaaagagcgacggagaaatgcccatctcctggctaatatgctgcagattttggagttgctcctcgctaatgcgctcttccagcgtctcgcaggcaggcaaattagcaaaaggcgtatcgctggtggaaacatccgcctcgacgatcagcgcatcggcgtttttgagctttttgagcaaacgggtgggcaggggagccatatcgtggctacccatatgaatactgccgatcagatgaaaatggcgattgccgggaagagagatatcgatagcaggccaggtgtaatgattaccgcgcagcgcggcccaaagcgtttttacccggtacaacagatccatacgacctccctttgtgaaatatcatgctagcgcgcggggagggatggcgcaaatggagttgattgttgcacttgtgcacagtgcttgtgtgcattacaatgattaaataatggacaaggagatgagagaggaatggctcaaaagaaaaatataaggagttttcgtgatgcctggttggctgattttttgtccattcaacgccacatcgaaagatccctgctgaaatccataccacgttatcacgaaagttggacatcattaatgctgccacttctcatcgggatttacgctcccctccggggaaccgatacgaagagttatccgggaaattacaggaatactcctccattagagtgaataaacagtaccgactgatttttaaatgggttaatggcaaggccgaagaattgtttttagacccacacaactactaaaacatagctgtcgtattgacgagaaaggtaaaactatgaaacaggcaacaagaaaaccgacgacacccggagatattcttctctatgaatatctggaaccgctcgatttgaaaatcaatgagttagcagagttgctgcatgttcatcgtaatagcgtcagtgcactgatcaataacaatcgtaaactcaccactgagatggcattccgtctggcgaaagtttttgataccacagtcgatttttggctaaacctccaggcggcagttgatctttgggaagttgaaaacaacatgcgtacccaggaagaattgggacggattgaaacagtggctgaatatttggcacgccgtgaagagcgtgcaaaaaaggtcgcgtagaataatttccctataacggatgcgccaccctaaagcagcgcatccgcaatgatgtacttattccttcggtttaaaccgcagcaatcggttggcgttactcactacggtgatcgacgagagcgccattgccgctccggcaaccaccgggttaagcagtgttccagtgaacggccacaaaataccggcggcgaccggaataccaatgctgttgtagataaacgcaccgagcaggttctgcttcatgttgcgcagcgttgcgcgggaaattgcgagcgcatccgcaacacccatcaggctatggcgcatcagggtaatcgccgcggtttcaatggcaacatcactgccgccacccatcgcaataccgacatccgcctgagccagcgctggcgcatcgttaatgccgtcgcccaccattgccacctgacgtccttcactttgcagacgtttgatcgcttcggctttaccgtctggcagcacgccggctatcacctcatcaatcccggcttctttagcgatcgcattggcggtggtcgggttatccccggttagcatcaccaggcgatatcccgctttatgcaggcgttgcagcgccgccacgctatcactacgcaacggatcgcgtacagccagcagggctactgctttcccgtcaaccgccagcagcacaggcgttgccccttgcgatgcctgagctgaaatatctgcttcaattgctttggtatcgacctgttggtcatttaacagcgcctgattgcccagcaataacgcatgaccttcagcttcaccgctcacgcccagcccgcgcaatgtgcggaaaccgttgacctgcggtagctgcatatcacctgctttatcgaggatcgcccgtgccagagggtggctggaaccttgctccagcgccgccgccagacgcaatgcttgcgcttcatcaatatcagcaaatgtttttactgcgacaacctgcggcttcccttcggtcagcgtcccggttttatcgaacactacggtgtcgagcgtactggcgcgttgcagcgcgtcggcgtcccgtaccagcacgccaaactcagccgcccgcccgacgccggaaataatcgacatcggcgtcgccagccccagcgcacacggacaggcaataatcagcaccgtggtggcaatcaccagagtatagacaatctgcggtgccggaccaaagaaataccagattgccgcactgatcagcgcaatcaccaccactaccggcacaaatacggctgagattttatccgccagctgaccgatttctggcttactgctctgggcctggcgcaccatacgaataatccgcgacagcgtagtatggctgccaaccgcactggcgcgaaacagcacgctaccgtcctgcaccactgtcccggcatggacgctatcgccttcgcctttttgctgcggtataggttcgcccgtcagcatcgcttcatccagccatgcttcgccctgggtaatctcgccatctactggcacgcgatcgccggtcgtcaggcgcagcaacatacctggttgcacttccgccagcggcacgcttttttcaccttcgtcagtaaccaggcgcgccgtcggcggagttaaatcgagtaatttctccagcgcctttgaagaacgctgacgtgcgcgcgcttccagcatatgaccgagattaatcagaccgataatcatcgcactggcttcatagtaaagatgccgtgcttccatcgggaaccacggcggccacaggttgacgctcatcgaatagagccacgcaacacccgttcccagcgccaccagcgtatccatcgtcgccgcaccgttcagcaggcttttccatgcgctgcggtaaaaatgcccgccggcgaaaaccattaccgccagggttatcaggccgataactaaccacaggctgcggttgtcagcggtgaccatcatgttatcgccgatcatcccccagaccatcaccgggatacccaccaccagcgcgacaattgcctgccagcggaagcgcttcatcgtagcgacggcggtttcttgctggcgctcgcggcgtttagcgtcatcttcaatcgcttccgcgccgtagcccgctttttccaccgcctgcactaaatcttgtggggaggcactgcccatcaccagcgcagtacgctccgccaggtttacccgtgcctgagtgacgcccggtacgctttgcaacgcattttgtacgcgggtgacacagctggcgcagctcatgccgctcagcagcaactgctggctgtcatcgtcatcggcggtcgctgccggaagcgcctcagaaaccgctgtcagtgcttccgacgggattgatgactccgccagcggtttagcctttgggtggcttacagatgcgtcataacccgcttgtttgatggtttcgattagctgttctgcactggcagtcccggtaacgtgcgcttcagtgatagacacatccgcctgttcaacatccgggcgctgttcgagactttctttcacgcgtttaacgcagtgaccgcaggacaggccgtccagggtcaggtcgatagtttgtgacataaaacactccttttaagacagttttgactggctgtgataaaggttaaaccttccagcaaggggaaggtcaagaaattaataaaccaggcgggtaaaagtccgtaaagattaaaaaatcggctcgatttgcatcaggattagacatttatctctttgttttcctgtagttaagttgcgggtgctaagttaaatcaggatgcatgaaaatcggcaccggggtgaggaattacctcccgcatctataaaaaggagttaacaaaagatgttagatgcaaacaaattacagcaggcagtggatcaggcttacacccaatttcactcacttaacggcggacaaaatgccgattacattccctttctggcgaatgtccctggtcaactggcggcagtggctatcgtgaccagcgatggcaacgtctatagtgcgggtgacagtgattaccgctttgcgctggaatccatctcgaaagtctgtacgttagcccttgcgttagaagatgtcggcccgcaggcggtacaggacaaagttggcgctgacccgaccggattgccctttaactcagttatcgccttagagttgcatggcggcaaaccgctttcgccactggtaaatgctggcgctattgccaccaccagcctgattaacgctgaaaatactgaacaacgctggcagcgaattttacatatccaacaacaactggctggtgagcaggtagcgctctctgatgaagtcaaccagtcggaacaaacaaccaacttccataaccgggccattgcctggctgctgtactccgccggatatctctattgtgatgcaatggaagcctgtgacgtgtacacccgtcagtgctccacgctcatcaatactattgaactggcaacgcttggcgcgacgctggcggcgggtggtgtgaatccgctgacgcataaacgcgttcttcaggccgacaatgtgccgtacattctggccgaaatgatgatggaagggctgtatggtcgctccggtgactgggcgtatcgcgttggtttaccgggcaaaagcggtgtaggtggcggtattctggcggtcgttcctggcgtgatgggaattgccgcgttttcaccaccgctggacgaagaaggcaacagtgttcgcggtcaaaaaatggtggcatcggtcgctaagcaactcggctataacgtgtttaagggctgatcatgatgaacacggaaggtaataacggtaacaaacccctcggtctatggaacgtcgtttccatcggcattggggcaatggtgggggcggggatcttcgcgctgctggggcaggctgcgttgctaatggaagcctcgacctgggtcgcctttgcttttggcggtattgtggcgatgttttccggttatgcctatgcgcgtctgggggcgagctatcccagcaatggcggtattatcgacttctttcgtcgcggattaggcaacggcgttttttcgctggcgctctcgttattgtacctgttgacgctggcggtgagtatcgccatggtcgcccgtgcttttggcgcttatgccgtgcagtttttgcatgaaggcagccaggaggagcaccttattttgctctacgcattggggatcattgcggtgatgacgcttttcaactccttaagcaaccatgcggtagggcggctggaagtgatcctcgtcggcattaaaatgatgatcctgttattgctgattattgccggtgtctggtcgctgcaaccggcgcatatttccgtttctgcgccccccagctccggggcgttcttctcctgtatcgggataaccttccttgcctatgcgggctttggcatgatggcgaacgcggcggataaagtgaaagatccggaggtcataatgccacgggcgtttctggtggcgattggcgttaccacgttgctttatatctcgctggcgctggttttgcttagcgatgtatcggcattagagttagaaaaatatgccgataccgccgtagcgcaggctgcttctccgctcctcgggcatgtggggtatgtgatcgtcgtcatcggcgctttactggcgacggcttcagccatcaacgcaaacctgttcgccgtgtttaacatcatggacaacatgggcagcgaacgcgaactgccgaagctaatgaataaacctctgtggcggcagagtacctggggcaacatcatcgtcgtggtgttgattatgctgatgacggcggcgctgaatttaggctcactcgccagcgttgccagcgccacctttttgatctgctatctggcggtgtttgtggtggcgatccgcctgcgtcatgatattcacgcctcgttgccgattcttatcgttggtacgttggttatgttgttggtgatcgttggctttatctacagtctctggtcccagggcagccgtgcgctgatatggattattggcgcactcttactcagccttattgtggcaatggtcatgaagcgcaataaaaccgtataacatctctctgtgcgcagtacttcctgtattattgtggtggcggtcgatattcgcactggcaaaaaaacgtgcttgaatatttgttgaaaccctttaacaaagcacaggaggcgttgcgcgaacgatgaacattagcgatgtagcaaaaattaccggcctgaccagcaaagccattcgcttctatgaagagaaggggctggtgacgccgccgatgcgcagcgaaaacggttatcgcacctacacgcagcagcatctcaacgaactgaccttactgcgccaggcacgccaggtgggctttaacctggaagagagcggcgaactggtaaatctgtttaacgatccgcagcgtcacagcgccgacgtcaaacgtcgtacgctggagaaagtagcggagatcgaacagcatatcgaagaactgcaatccatgcgtaaccagctgctggcgctggcgaatgcctgccccggtgatgacagcgccgactgcccgattatcgaaaatctctccggctgctgtcatcatcgggcggggtgattaaggcttgcgaaaatagtcgtccattattttcgtcagctccggacgttccccgtcatcattgatggcaaaatccagaaaaaaagcatctgcttgcggcgttcggttttgcgccatcaaccggaaggtgagggggcgataaatggcgtatgccggatggctgataacgaatcgggcaaagtcaataaaaagcggcgagtgtgtggaaaacagcgcctgcaaaataatatcagccttttcatcctcccccaaaccttgttggatcatgctcttaatacgagtttcgctcaaattcccggcctcaacaatttgccaggcttgatccagcgaggggtaccgactgacgctctgctttaactcttctgaccaggtttcggatgggctgatgtgcttatcagggccgaaactctcccatgcgctgggcggtaatgttttgcacgcggtgagttttggtatgtggtattgcagctctgttttgtgcagacattccccgccaggaaataccagggtttgttgctcatcattaaaatgggttgccgtgctgagcaccagtgttttgagcggtcgcccttccagcgcggcggcagtagccttatggtgtccgtcgagcagaacgcagagataggaatcagggagataccaggccagagcgcgggcgtccggtttatcgcgataaaacgtcgcacgctcaggattaaaatgtgatggcggctggccgggtagaagaaagcagggcgcggtgtcactgaaagagcaatattcaggatcccagacggcaacggttgccggattactggaactatggtccgttgccgcccaaaagaaatgcccgttgccatccgtcgggtaaagttcacgatcttccagcaaataataaccatcagccatgcatgagaacagcggtgtcagcgcggcaaaagcgtccgttatgccagaccacgggcgattccagttttcgagagcagacaaaaaccgggcggctccctgttcatcctccgcaaaaccgctgtagacaaattccgcacaggtagggcatccagcctcggaccagaaacgtattaacgggacatcctgccagcagagcgaatggataagaccgtgcgagtgcggatcgtaaatcacacattgacgcagaaatcctttcccggacttcaccgaaaaaatgacgcccgcagcagtatttttcagcagacgtacttcaggttttcgaaagggggaaaacatggctactccttagccgaacattcaattaacactatgtagggggctatatgccggatgcggcgtaaacgccttatccggcatggggtttggtacagatttccaggtgtgataagacgcatcaggcgatgaccgcacggatgatcagcgttatcccttctatcgcaatgacttcaacatgcgtaccagcgccgagatcctcgctggcgctgacaggccatgaactgtcaccgacgcgcatatgaccgcgcccgttgaccagtggagattccagcacaaaacgtcggccaatcagctgctgcccgcgctggtttaaatgactgtcgctgtgcttttgttcgcgcacccgccgcgacagccatttccaccacaaccaggcggcgagcagtgtcagaatggcaaacatcaccccttgccactcccaacccagcggcaccagccagaccaccaggccggtaatcaccgctgccacgccgctccacaacagataaccattgccgcccaacatctcggctgccagcagcaacccgccgagactgagccagaaaatatgtggatgaacgaccattaactccatcatggctgagtccgtttgttggcgctgtctttcaccagctcggcaatcccggcaatcgaccccatcaggctgctggcctctaatggcatcatcactactttgctgttactggaggaaccgatctgctgtaacgcttcggtgtatttctgtgctacgaagtagttcaccgcctgaatatcgccggaggcaatggcttcagacaccattttggtggcgcgggcttccgcttcggcagaacgttcacgcgcttcggcctgtaagaatgccgactgacgttcaccttccgctttcaggatttgcgactgtttttcaccttcggctttgaggatttccgcttgacggatcccttccgcttcaaggatgtaagcgcgtttggtacgttccgctttcatctgcgcgttcattgaagagataagctctgccggtgggcgcacgtcgcgaatttcaatacgggtgactttaatcccccacgggttggtggcctcatcgacaatacgcagcaggcgtgagttgatgctgtcgcgctgagagagcatttcatcaagttccattgaacccaacacggtacggatgttagtcatggtcaggttgatgatcgccagctccagattgctgacttcataagcggcgcgcggggcatcaatcacctgaataaagcacacggcgtcgatggtaacgttggcgttatctttcgagataacttcctgggaagggatgtcgagcacttgctccatcatattgatcttgcgaccaatgcgatccataaacggcaccaccagactgagccccggctgtaacgttttggtatagcgaccaaaacgttctaccgtccattgatagccctgcggcacgattttgacgcccgcgccgacaatgaccagcgcgacaaaaatgagaatagggataaagataagcatcggaaaaacctcctgttgtaccgtccataatcagcaaaattgctgcttgattaaacaaattatacctgattactgaaagagagttcccccctattcctgcgaaggataaactgtttttagtaaaaatcagaaaaagggaacagtgatgcaggaaaatagtcctttgcttcagctacaaaacgtaggatatctggcgggtgatgcgaagattcttaataacatcaatttttcgctgcgtgctggcgaatttaagttaattaccggtccttctggttgtggcaaaagtacgctgctaaaaatagttgcttcattgatcagcccaaccagcggaacgttactgtttgaaggtgaggatgtcagcacactaaagccagaaatctaccgccagcaagtctcttactgcgcccagacgccgacgctgtttggcgatacggtatacgataatctgatctttccctggcagatccgtaaccagcagcctgacccagccatttttctcgattttctcgaacgcttcgctttgccggacaccattttgacgaaaaatatcgccgagctatctgggggtgaaaaacaacgcatctcattgattcgtaacctgcaatttatgccgaaggttttattgctggatgaaatcaccagtgcgctggatgaaagtaataaacataacgttaatgagatgatccatcgttatgtgcacgagcaaaatattgccgtgctgtgggtgacacacgataaagacgaaattaatcatgcggataaagtgattacactgcaaccgcatgccggagaaatgcaggaagcacgctatgaactcgcataatattactaacgaatcattggcactggcattaatgctggtggtggtggcaatcttaattagccataaagaaaaactggcgctggagaaagatattctctggagcgtcgggcgcgcgataattcagctgattattgtcggctatgtgctgaagtatattttcagcgtggatgatgccagcctgacattattgatggtgttatttatctgctttaatgcggctgtggaacgcgcaaaaacgcagtaaatatattgctaaagcttttatctcatcgtttattgccattacggtcggggcgggaattactctggcggtgctgattttatcgggatcgattgagtttatcccgatgcaggtgatccctatcgccgggatgatagccggtaacgccatggtagcggtggggttgtgttacaacaatttagggcaacgggtcattagcgaacagcaacagattcaggagaaactgagtcttggcgcgacgccgaaacaggcttcagcgatattgattcgcgacagtattcgcgcggctttaattccgacggtcgattcagcaaaaacggtaggcttagtgagtttaccaggaatgatgtccgggctgatatttgccgggattgatccggtgaaggcgattaaatatcagattatggtgacctttatgctgctctcaaccgccagcttgtcgaccattattgcctgctatttaacctatcgtaagttttacaattcgcgccaccaattggtggtgacgcaattgaagaagaaatgatgcgatgccggatgcgcagcatcgcatccggcgttgtggttcatgtgccgatcaacaaaacatcaatacaacaacgcatacagctggcggcgatacttcgacgccagtgcatcacccgtacccagcgcagcgaggatctcctggaatgttttacgtgtctgaccatctgcggcggtgagatctttacgcagatgcccaaacagtaactccagcgcctcttcattgcgcccaacctggtgcagttgcagtgccagttgcgtcgccagtgcggcatcttcaggattctccgccacctgctgttgcaactgttgaatttccggcgtatcagccgcctgcttcagcagttcgatttgcgccaccagcccctgatagcgggtgtcctgatcctgcaacggaatggttttcagcacggcttctgcatcttcagaacggttcagcgcaatcagcgtttctgccaacagcaggccgatctccccgttctgattcgacaactgccaggcgtctttcagcaatggcagggcgtcggtgtgattgccttcctgcatcagttgcatcgcctgctgcgctttcagctcttcttcacgcggcagcactttatccagcagggcgcggatcgcctcttccggttgcggcccctggaaaccgtctactggttgcccgttctggaacagatatacggtcggaatcgcgcgcagaccaaactgggcggcaatcatctgctccgcgtcgcagtccagcttcgccagaataaattgcccgttgtactgcgccgcgaggctttccagaattggggttaactgcaaacagtgctggctacgttcagaccaaaaatagaacagcaccggagtggtcatcgactgttcaagaacctgttgcaggttagattcgttaatgttgacaatattttctacggacatggagtcgctctctgttgtcgatattttctttgacatgggggcttaagcgcgcgcttcaactcacccctgcaatattttgtccatcacgcgccccggcagcaggcgcttaagcaccattactgcccaggtcaccagcgttaccggatagcgcatcttcggcttctcgctaataaaagcatggcgcactttgtcgaccaccgcttccggtcccaacgtaaagcgggcggcgatgccaggattttcgactggtttatcactttgcgtctgattgacgttgtcggtgaagcgagtacgaatgggaccaggttcgatcaggctgactttaattccgctgtggcgcagctccatgcgcagtgcgtctgaccacgcctccagcgcatatttactggccgcgtaagcgccacgacccggtgtggagattaatcccatcaccgatgaggtcatcacaatacgcccttcaccgtgcggcaacatcgcgggtaacaggcgcatggtgagctggtgtgcgccgaaaaagttggcggaaaactgctgttccatctgcgcacggctgatggtggaaagggggccatacatgccgaatccggcattgttaaagatcccatacagacaattatcggtcagggcgatcacttcgtcggctgcgcgatcaacactttctggcgaatccagatcgatcaacacgccggtaaatcccatgctgttcatgcgctcaacatcatccggtttccggcaacctgccagcacatgaaaaccctggcgttttaattcgagcgcgctttccaggccaataccactggaacatccggtaattaagaccgatttttgcataactttacctgtcaggatctccgttgctttatgagtcatgatttactaaaggctgcaactgcttcgccatccagtcggcaataaacggctgggcgtcgcggttgggatgaataccgtcatcctgcatccattgtggcttgaggtagacctcttccataaaaaagggcagcagcggaacatcaaactctttggcgagtttggggtaaatggcgctaaaggcttcattataacggcgaccatagtttgcaggcagacgtatttgcattaacaatggttcagcgttggcggctttgacatcctgcaaaatctggcgcagcgtttgctcggtttgctgtggttgaaaaccacgcaaaccgtcattgccgcccagttcaaccagcacccagcgcggctgatgctgtttcagcagagccggaaggcgcgccagcccttgttgcgaggtgtcgccgctgatgctggcattgactaccgacgttttactctgccacttatcattcaacaaggcaggccaggccgcgctggcagacattcgatacccggcgctcaggctatcacccagaatcaataacgtgtccgctgcagcggcacggaaggttaacaggaccaggaacaggaagggcaaatgccagcggaaaacattgttgaagttcatcatcttaagaagtccgtcggtcagggggagcatgaactctccatcctcaccggagttgagctggttgtcaaacgtggcgagaccatcgcactggtgggtgagtcgggatcgggtaagtcaaccttgctggcgatcctcgccgggctggatgacggcagcagtggcgaagtgagtctggtgggacaaccgctacataatatggacgaagaagcgcgggcaaagttgcgcgcgaagcacgtaggctttgtttttcagtcatttatgttaattcctacccttaacgcgctggaaaacgtcgagcttccggcgctgctgcgcggtgagagtagcgcagaaagtcgtaacggggcgaaagcgttgctcgaacagttagggttgggtaaacgtcttgatcatcttccggcacagctttctggcggcgaacagcaacgagtggcgctggcgcgagcctttaatggtcgatctgatgtgctgtttgccgacgaacccaccggcaaccttgaccgccagacgggcgataaaattgccgatctgcttttttccctcaaccgtgagcatggcaccacgttgattatggtgacccatgacctgcaactggcggcacgctgtgaccgctgcttacggctggtgaacgggcagttgcaggaggaagcatgattgcacgttggttctggcgcgaatggcgctcgccgtcgctattaattgtctggctggcgttaagcctggcggtggcctgtgtgctggcgctgggcaatattagcgatcgcatggagaaaggtttaagccagcaaagccgtgagtttatggcgggcgatagggcgttgcgcagttcgcgcgaagtgccgcaagcgtggctggaggaagcgcaaaagcgcggcctgaaagtcggcaagcagctgactttcgccacaatgacctttgcaggcgacacaccgcagctggcgaacgtcaaagcggtggatgatatctacccgatgtatggcgatctgcaaactaatccccctggcctgaaaccgcaggcgggcagcgtattgctggccccacgcctgatggcactgcttaacctgaaaacgggcgataccattgacgtgggcgatgccaccttgcggattgccggagaagtgattcaggaaccggattccggttttaatcctttccagatagccccacgcctgatgatgaatctggcggatgttgataaaaccggagccgtgcagccggggagtcgggtcacctggcgctataaattcggcggcagcgagaaccagctcgacggctatgagaaatggttgttaccccagcttaaacccgaacaacgctggtacggtctggaacaggacgaaggcgcgctggggcgatcgatagaacgttcgcaacagttcctgctgctttcggcgcttctgaccttgctgctggcggtggcggcggtcgcggtggcgatgaatcattactgtcgcagtcgctacgacttggtggcgatcctcaaaacgctgggggcagggcgagcgcaactgcgtaagttaatcgtcggtcagtggttgatggtgctggcgctttcagccgttaccggtggggcgataggcctgttgttcgaaaacgtgttgatggtgctgctcaagcccgtgctacctgccgctttacctcctgccagcctctggccgtggctgtgggcgctcggcaccatgacggtcatctcgctgctggtggggctgcgaccataccgcctgttgttggcaacgcagcctttacgcgtgttacgtaatgatgtggttgcaaacgtctggccgctgaagttttatctgccgattgtcagtgtggtggttgtgctgctgctcgccggactgatgggcggcagtatgctgctctgggcggtgctggcgggcgcggtagtactggctttgctgtgcggtgtgctgggctggatgctgctgaatgtacttcgccgcatgacgctgaaatcgctacctctgcgcctggcggttagccgcctgttgcgtcagccgtgggcgacgttaagccagctttcggcattttcgctctcctttatgctgctggcactgttgctggtgttgcgtggcgatctgctcgaccgctggcaacagcagctaccgccagaaagcccgaactactttttaatcaacatcgctacggaacaggttacgccgctgaaagcgtttctcgcggaacatcagatagtcccggaatcgttttatccggtggtgcgggcgcggttgacggcgattaacgacaagccgacagaaggcaatggagatgaggcgctcaaccgcgagctgaatctcacctggcaaaatacgcggcctgatcataacccgatcgtcgccggtaactggccgccaaaagccgatgaagtgtcgatggaagaggggctggcgaaacgcttaaacgttgccctcggcgataccgtgacttttatgggcgatacccaggagttccgcgctaaagtgaccagcctgcgcaaagtggactgggaaagtctgcggcctaatttctattttattttcccggaaggggcattagacgggcaaccgcagagctggcttaccagtttccgctgggagaatggcaacggcatgttgacgcaactcaaccgccagttcccgaccattagcctgttagacattggcgcgattttaaaacaggtcggtcaggtgctggagcaggtaagtcgggcgctggaagtgatggtggtgctggtcaccgcctgcggcatgttgctgttgctggcgcaggtgcaggtgggaatgcgtcagcgtcatcaggagctggtggtgtggcgcacacttggtgcggggaaaaaactgctgcgcacgacattgtggtgtgagttcgccatgctcgggtttgtatccggcctggtggccgcaatcggtgcggaaacggcactggcggtactgcaatcgaaagtgtttgatttcccgtgggagccagactggcgattgtggattgtgctgccgtgcagcggtgcgctactgctgtcgctttgcggcggctggctgggtgcgcgactgcttaagggtaaggcgctgttcaggcagtttgcggggtgatgacaggtgttagattgcctgatgcgctacgcttatcaggcctacgaagatcgtgcaatatattgagttttcgaaattttgtaggctggataaggcgttcacgccgcatccggcatgaacagcgtgcacagaatcccccatcactgcgccttaacccattccgccacttcctgcccactcaccgcgaaagacaactttttccgcttttttctcaagctgatagcgatacatcgggtcgtaatattcttcaagtaacggcaccagccaggccagatgaccgtcggtgctgccggtggtgagttgcgttgtcagcgccgcatccagccttgcagccagttcgttatagcgttgtagtcccagccgacgtttaatcgccgaaagcccgtgatgcaggtattcgcaatactcctgccagccctgttcgtcgccataagcgtgggtaaaatcatgatgcatacgcaagaaatactcttcgttcaggcgttcaagacggatctcaaacggatcttctaccaccgcaatcgtcgcctgagtcattcgttcgcgcagacattccggcaggtgattcgaaccgatcatccggctttcatcttccagcacccacaggcgcaaatcctgatgggcgtcggtttttagcatttcggcagccagcatgttttcaaaactcgcctggctaagttgtggttgtaacgtgcgaccaaaagcagaaccgcgatggcgcgccagcccttccagatcaacaccgttcggctgttgttgtactaacagcgttttgccgctgccggtacaaccgccaatcagcactatcggtttttgtgccagttcaatggttgcctgaatcgcggtctggcgcagtgccttataaccgccttccaccagcggataatcaatccccgcgtcatgcagccagcgttgcacaatatgcgagcgttgaccgccacgggcgcagcagagaataccgtgcggattttgcaggcacgctgcccgccaggcgtccatgcgctgctgacgaatttcacccgccaccagtttatgccccagtgccagcgccgcgtctgacccttgctgtttatagcagatgccaacggcggcgcgttcatcgttattcattaacggcaggttgatagcggcgggcattgcgccttgctcaaactcgatgggggcgcgaacatcaataatgggcgtatcagcaatcagcagggcacgatagtcctgttccgtgtgtctctcttgcatagtaaaaagtgaacctcaaatcagcttgcgcgctattttacgcgccaacgcgcaaggaaacttgatttttaactgcgtgggttgccgaaaatttctaaaaatccgctgatttccggcctgcgctgggtaaacaaggtcacaatatcttctaccgctttgccgctgccaaatttgcgccatgccagactcaatggcgaaggagggcgcatcgttgggattacccggctgaccagttgttgattatcgagcattgactggcaaagtgattttggcaaaaaaccaatgcccacgcccgccagatgggcggcgattttcgtttccatatcgggaacaataatctctttttgccccggcaatcgccaggcgacgcgtttggttaaggtgcgggcgctgtcttcaatattgaccgccggaaagcgccgcaactgtgcttctgttagcggctcttcaacgttcgccagcggatgatccgccgccatgacaaagcgccattgcaccgatcctaagggatcaagactaaaggtatttgccagcgcctcggttcccgtgacgccgatagccagtgaaaaaccttcgtacaatagcgagtcccagacgcccatatagatttgtcgggagatgtgaaattgggtaaacgggtaacgttcatttagccacgccagcagcctggcaacggcctgagggttatagagcaggttgttgatgacgatattcacctggcgttccacgccatcattcacctgttgtaactcgctgggcatactttccagccagctcagccagtctctggcctgacaaagtagatgctcgccagccgccgtcaacgtcacgctgcgagtcgtgcggaaaaacagcgccactccggtattctcttccagaagtttaatgcgataactgatcgtcgccgtggttttacataatcgttctgccgcttttgaaaaacttcctgtttcagcaaccgcaatgaaagtccgcaaggtttctggatcgaacatcttcaggtatccccttttaaatccgcaagttgcgtgattttcttatcctctgatttatcagtatttttacatgataaccctgttcaatttgtggactaaatctagttttggaaaaatattccaacttttgtgttgatgttgttctcttaaggttttagattgcctgttattgaaaccaagctgaccggtcggcggtggttgaacggaattatgttacaaggacaaaaagatgaaacttcaggtattaccgttaagtcaggaagccttctgtgcttatggcgacgtaatcgaaacgcagaaacgggattttttccatattaacaatggcctggtggagcgctatcacgatttagcgctggttgagattcttgagcaagaccgtacgcttatcagcattaaccgcgcgcaaccggcgaatctgccgctgaccattcacgaactcgaacgtcatccgttgggcactcaggcctttatcccgatgaaaggtgaagtgtttgtggtagtcgtggcgttaggtgacgacaaaccagacctgtcaaccctgcgggcgtttattaccaacggcgaacagggagtgaattaccatcgtaacgtctggcatcacccacttttcgcctggcagcgcgtcaccgattttctgaccatcgatcgcggcggcagtgacaactgtgatgttgaaagtattcctgaacaggaactctgttttgcgtgacgcctgcaaccgacttgcataagataaacgaattgttcattgtttatgctcatttgtaggtcggagttaacgtaggtatgacggaagttagacggcgcggcaggccaggacaggcggagcctgtggcacagaagggtgcacaggcgttagagcggggaattgcgattctgcaatatctggaaaaaagtgggggaagttcgtcggttagcgatatctctctcaatctggatttgccgctctccacgacctttcgcttgctgaaggttttacaggcagcggattttgtctatcaggacagtcagttaggctggtggcatataggattaggtgtctttaacgtcggtgcagcgtacatccataaccgcgatgtactctccgtcgccgggccgtttatgcgccgcctgatgttactttccggcgaaacggtcaatgtcgcgatccgtaacggcaatgaagcggtattaattggtcagttagagtgtaaatcgatggtcaggatgtgtgcgccgctgggcagtcgtctgccgctgcatgcttccggagcgggcaaggcgctgctttatccgctggcggaagaagagttgatgagcatcattctgcaaaccggtttgcagcagtttacgccaacgacgcttgtggatatgcccaccttgctgaaggacctggaacaagcgcgtgaactgggctataccgtagataaagaagagcatgttgtcggcctgaattgcatagcttcagcaatttacgatgatgtaggtagtgttgttgccgctatctccatctccgggccttcatcaagactgacagaagatcgttttgtcagccagggtgagctggtcagagacaccgcccgcgatatcagcacggcgttgggactgaaagcacatccatagtgtctgtcgtatcccgctctgcggagcgggtttttttgacaaaatttgagagttggaaaatttttccaattaatagaggtaggaataaaatggcaaaaatgagagccgttgacgcggcaatgtatgtgctggagaaagaaggtatcaccaccgccttcggtgttccgggagctgcaatcaatccgttctactcagcgatgcgtaagcacggcggtattcgtcacattctggcgcgtcatgtggaaggtgcttcgcacatggcggaaggttatacccgcgcaacggcagggaatatcggcgtatgtctggggacttccggtcctgcgggcacggacatgatcaccgcgctctattccgcttctgctgattccattcctattctgtgtattaccggccaggctccgcgcgcccgtctgcataaagaagatttccaggccgttgatattgaagcaattgctaaaccggtcagcaaaatggcggttacagttcgtgaagcggcgctggtgcctcgtgtgctgcaacaggcgtttcacctgatgcgttctggtcgcccgggtccggtactggtggatttaccgttcgacgtacaggttgcggaaatcgagtttgatcctgatatgtatgaaccgctgccggtctacaaacctgctgccagccgtatgcagatcgaaaaagctgtagaaatgttaatccaggccgaacgtccggtgattgttgccggaggcggggtaatcaatgctgacgcagctgcactgttacaacagtttgctgaactgaccagcattccggtgatcccaacgctgatgggctggggctgtatcccggacgatcatgaactgatggccgggatggtgggcctgcaaaccgcgcatcgttacggtaatgcaacgttgctggcgtccgacatggtgtttggtatcggtaaccgttttgctaaccgtcataccggttcggtagagaaatacactgaagggcgcaaaatcgttcatatcgatattgagccgacgcaaattggccgcgtactgtgtccggatcttggcattgtctctgatgctaaagcggcgctgacgctgctggttgaagtggcgcaggagatgcaaaaagccggtcgtctgccgtgtcgtaaagagtgggtcgccgactgccagcagcgcaaacgcactttgctgcgcaaaacccacttcgacaacgtgccggtgaaaccgcagcgcgtgtatgaagagatgaacaaagcctttggccgcgatgtttgttatgtcaccaccattggcctgtcacaaatcgctgcggcacaaatgctgcatgtctttaaagaccgccactggatcaactgtgggcaggcaggcccgctgggctggacgattccggcggcgctgggggtttgtgccgctgatccagagcgcaatgtggtggcgatttccggtgacttcgacttccagttcctgattgaagaattagccgttggcgcacagttcaacattccgtacatccatgtactggtcaataacgcctatctgggtctgattcgccagtcgcaacgtgcctttgatatggattactgcgtacagctcgcgttcgaaaatattaactccagcgaagtgaacggttatggcgtcgaccacgtaaaagtagcggaaggtttaggttgtaaagctattcgcgttttcaaaccggaagatattgcaccagcctttgaacaggcaaaagtcttaatggcgcaatatcgggtaccggtagtcgtggaagttattctcgagcgtgtgactaatatttcgatgggcagtgaactggataacgtcatggaatttgaagatatcgccgataacgcagcggatgcaccgactgaaacctgtttcatgcactatgaataagggagataaataatgttacgtttctctgctaatttatcgatgttatttggtgaatatgattttctcgcccgttttgagaaagctgcgcagtgtggttttcgcggcgttgaatttatgttcccttatgactacgacattgaagaattaaaacaggtgctggcgagtaataaactcgagcatacgctgcacaatttaccagcgggtgactgggcggcgggcgagcggggtattgcctgtattcctggccgtgaagaagagtttcgggatggcgtagcagcagcgattcgttatgctcgtgctctgggtaataaaaaaattaactgtctggtcggtaaaacgccgactggtttcagcagtgaacagattcacacaacgcttgtagaaaacctgcgttatgccgcgaatatgctgatgaaagaagatattttattactgattgaacctattaaccattttgatattcctggtttccatctcaccggaacccggcaggcactgaaactgattgacgatgttggttgctgcaatttgaaaattcagtatgacatttatcacatgcagcggatggaaggtgaattaactaataccatgactcagtgggccgataaaattggtcacctgcaaattgctgataatccgcatcgcggcgaaccgggaaccggagaaattaattacgaatatctctttacggtaattgaaaattctgactacaacggttgggttggctgtgaatataaaccccaaaccaccacggaagccggtttacgctggatggatccgtaccgttaaaacgtaacgctattcagacaatgcttttttaggccgctaagttggcaggggatcgtgttgtctgaattcaggaaaagcgaaatttaaaagaggttaattatgaaactgggatttattggcttaggcattatgggtacaccgatggccattaatctggcgcgtgccggtcatcaactgcatgtcacaaccattggtccggttgctgatgaattactgtcactgggcgccgttagtgttgaaactgcgcgccaggtaacagatgcatcggacatcatttttattatggtgccggatacgccacaggttgaagacgttctgtttggtgaaaatggttgtaccaaagtctcgctgaagggcaaaaccattgttgatatgagctccatttccccgattgaaactaaacgtttcgctcgtcaggtgaatgaactgggcggcgattatctcgatgcgccagtctccggcggtgaaatcggcgcgcgtgaagggacgttatcgattatggttggcggtgatgaagcagtatttgaacgtgtaaaaccgctgtttgaactgctcggtaaaaatatcactctcgtgggcggtaacggcgacggtcaaacctgcaaagtggcaaatcagattatcgtggcgctcaatattgaagcggtttctgaagccttgttgtttgcttcaaaagccggtgcggacccggtacgtgtgcgccaggcgctgatgggcggctttgcttcctcacgtattctggaagttcacggtgagcgcatgattaaacgcacctttaatccaggtttcaaaattgcgctgcaccagaaagatctcaacctggcactgcaaagtgcgaaagcactggcgctgaacctgccaaacaccgcgacctgccaggaattgtttaatacctgtgcggcaaacggtggcagccagttggatcactctgcattagtgcaggcgctggaattaatggctaaccataaactggcctgatacccgcaataaaaatggccgatatcagaaaatgaatcggccagcaatattaaaaaaagaaagcagccaaagatgttgcttcagtattaaaaataatatttttattttatttgttcctcatagctagattaaaacaacgttattcgatacgtgaaattaagagggatttatggaacatcagagaaaactattccagcaacgcggctatagcgaagatctactgccgaaaacgcaaagtcagcggacctggaaaacatttaactattttaccttatggatgggttcggttcataacgttcccaattatgtgatggttggcggcttttttattctcggcttgtctacctttagtattatgctggcaattatcctcagtgcctttttcattgccgcggtaatggtattaaacggtgctgcgggcagtaaatacggcgtaccgtttgccatgatcctgcgtgcttcttacggcgtacgtggtgcactgtttcccggattattaagaggcggtattgctgccattatgtggtttggcctgcaatgttacgcggggtcactggcctgcttgattctgattggcaaaatctggccgggatttttgactctcggtggcgatttcacgctgttaggcctttctctaccgggattaattacttttttactcttctggctggttaacgttggtattggttttggcggcggaaaagttttaaataaattcactgccattcttaacccgtgcatctatatcgttttcggcggtatggcgatttgggcgatttcgctggtcgggatcggtccaatctttgactacattccgggcggtattcagaaagcagaaaacagtggcttcctgtttctggtggtgataaacgcggtggttgcggtctgggcggcaccggcggtgagcgcatccgactttacgcaaaacgcccactcgtttcgtgagcaggcgctggggcaaacgctgggtttagttgtggcctatattctgtttgcggtcgccggggtatgtattattgccggagccagtattcattacggcgctgacacctggaacgtgctggatattgttcagcgttgggacagcctgttcgcctcgttctttgcggtactggttattctgatgacgactatctctactaacgccaccggtaatattattccggctggttatcagattgccgccattgcaccgacgaaactgacctataaaaacggcgtactgattgccagtattatcagcctgctgatctgcccgtggaaattaatggaaaatcaggacagtatttatctgttcctcgatattatcggcggaatgcttggtccggtaattggtgtgatgatggcgcattattttgtggtgatgcgtgggcaaattaatcttgatgaactgtacaccgcacctggcgattataaatattacgataacggttttaacctcaccgcgttttcagtaactctggtggccgttattttatctcttggcggtaagtttattccctttatggaaccgttatcacgtgtttcatggtttgtcggcgtcatcgtcgcctttgcggcctacgccttattaaagaaacgtacaacagcagaaaaaacaggagaacaaaaaaccataggttaattaatcacgatattgaacattgagttaaaaaccaatctgtattttacaaggagtttgttatgtcttttgatttaatcattaaaaacggcaccgttattttagaaaacgaagctcgcgttgtagatatcgccgttaaagacggaaaaattgctgctatcggccaggatctgggcgatgcaaaagacgttatggatgcgtctggtctggtggtttcgccgggcatggttgatgcgcacacccatatttctgaaccgggtcgcagccactgggaaggttatgaaaccggtactcgcgcagcagcaaaaggtggtatcaccaccatgatcgaaatgccgctcaaccagctgcctgcaacggttgaccgcgcctcaattgaactgaagttcgatgccgctaaaggaaagctgactatcgatgcggcacaactcggtggcctggtgtcttacaacattgaccgtctgcatgagttggatgaagtgggtgttgtcggtttcaaatgcttcgttgcgacctgtggcgatcgcggtatcgacaacgacttccgtgacgtcaatgactggcaattcttcaaaggcgcgcagaagctgggtgaactaggccagccggtgctggtgcactgcgaaaacgcgctgatctgtgacgcactgggcgaagaagcgaagcgtgaaggtcgcgtaactgcccatgactatgtggcttcgcgtccggtatttaccgaagtggaagcgattcgccgcgtactgtacctggcgaaagtcgctggttgccgtctgcacgtttgccacgtcagcagcccggaaggtgttgaggaagtgactcgtgcacgtcaggaaggtcaggatgttacttgtgaatcctgcccgcattactttgtgttggataccgatcagttcgaagaaatcggtactctggcgaagtgttcaccgccgatccgcgatctggaaaaccagaaaggcatgtgggaaaaactgtttaacggtgaaatagactgcctggtttccgaccactctccatgcccgccggaaatgaaagccggtaacatcatgaaagcgtggggcggtatcgctggtctgcaaagctgcatggacgtgatgttcgatgaagcggtacagaaacgcggaatgtctctgccaatgttcggcaaattaatggcgactaacgcagcagatattttcggtctgcagcaaaaaggccgtatcgctccaggaaaagatgccgacttcgtcttcattcagccgaatagcagctatgttcttaccaatgacgatctggaatatcgccacaaagtcagcccgtatgttggccgtactattggcgcgcgtatcacgaaaaccatcttacgtggtgatgtgatttacgatatcgaacagggcttccctgttgcgccgaaaggtcaatttatccttaaacatcagcagtaatctggccctgcaatgcccgtccttgtggcgggcattctccggttaaggtgtgtttatgttcaattttgctgtgggccgcgaaagcctgttatcaggatttcagtggtttttctttattttttgcaacacggttgtggttcctcctacgctactttctgcttttcagttgccgcaaagtagcctgcttacgctcacgcaatatgcttttcttgctaccgcactggcctgcttcgctcaggcgttctgcggtcatcgtcgcgctattatggaggggccgggcggcctgtggtggggaaccatcctgactatcacccttggcgaagcatcgcgcgggacaccgatcaacgatatcgctaccagtctggcggtggggattgcgctctccggcgtgctgacgatgttgattggttttagcggattaggccatcgcctggcacggttatttacgccgtctgtgatggtcttgtttatgttgatgctgggtgcgcaactgaccactatctttttcaaaggtatgctcgggctgccgtttggcatagccgacccgaattttaaaattcaattaccgccgttcgcgctctcggtggcggtgatgtgcctggtactggcgatgattattttcctgccacaacgttttgcccgttacggcctgctggtcggtacaataaccggctggttgttgtggtacttttgctttccttcttcgcattcgctctccggtgagttgcactggcagtggttcccgctcggcagtggcggtgctttgtcgccggggattattctgacggcggtgattacaggtctggtaaatatcagcaatacctacggtgcgattcggggcacggatgttttttatccgcagcagggcgcggggaatacgcgttatcgtcgcagctttgtggcgaccggatttatgacactgataaccgtgccgctggcagtaattccattttcaccgtttgtttcatccattggtttattaacccagactggcgattacacgcggcgttcgtttatttatggcagcgttatttgcctgctggtggcactggttccggcactcacgcgactgttttgcagtatccctttacccgtgagtagcgcggtcatgctggtttcttatctgcctttactcttttccgcgctggtgtttagccagcaaataacgtttaccgctcgcaatatttatcgactcgcattgccgttatttgtcggcatatttttaatggcattaccgcctgtgtatctgcaagaccttccattaacgcttcgtcctctgctcagtaacggcttactggtcggaattttactggctgttcttatggataatcttattccgtgggaacgcatcgaataatttgttgaaaaaggattgataatgaagattgtcattgcgccagactcttttaaagagagtttaagtgcagaaaaatgttgtcaggcaattaaagccgggttttcgaccatatttcccgatgcgcactatatctgtttgccgatagcggatggcggcgaagggacggtggatgcgatggtcgccgcgacgggcggcaacatcgtgacgcttgaagtctgcgggccgatgggcgaaacagtgaatgctttttatggccttaccggcgacgggaaaacggcggtgattgagatggcggcggcaagcggcctgatgctggtcgcgcctgaaaagcgtaatccgttgctggcgtcaagttttggcaccggagagctgattcgtcatgcgctggataacggcattcgccatattattctcggcattggcggcagtgcgacggtcgacggcggtatgggcatggcgcaggcgctcggtgtgcgtttccttgatgctgacggtcaggtgctggcggctaacggcggcaatttagcgcgcgtggcaagcattgagatggatgaatgcgatccgcgtctggcgaactgccatattgaagtagcatgtgatgttgataacccgctggtaggggcacgcggcgcggcggcggtgtttggtccgcaaaaaggggcaacgccggaaatggtcgaagaactggaacaggggctgcaaaattacgcccgtgttttacaacagcaaactgaaattaatgtctgccagatggcgggcggcggcgctgcgggcggtatgggcattgcggcgacggtattcctcaatgcggatattaaaccgggtattgagattgtgttgaatgcggtcaatctggcgcaggcggtgcagggtgcagcactggtgatcaccggggaagggcgcatcgactcgcaaacggcaggcggtaaagcgccgctgggcgtggcgtcggtggcgaagcagtttaatgtcccggtgattgggattgctggcgtattgggtgatggcgtggaagtggtgcaccagtacggcattgatgcggtattcagcattttgccacgtctggcacctttagccgaagtgctcgccagcggtgaaaccaatctcttcaacagtgcgcgaaatattgcctgcgccattaaaataggtcagggaattaaaaactgactattacctttaaagcggatgcgatttatatcgcatctttttttacctgaattgactacaaaaaaagccacggaataaaccgtggcaaaatccaacatagctaaaaataatcaggcgagtggtatgacttaaatctctacgtcgcggttgcaatctttcgagtaaatatagctgaacgcttcaccacgccccacgccataaccggcctgtaaggaataagcgcccataaagatgtaatcgccttttttcaccgggatccagttattgtcgaggttataaaccccctgaccggaaagaatataggcaccgtgttcctgaacgtgtgtttcgatataaccatggctggcacctggcgcaaaagagaggatatgcatgttcatatcaaaacctaactctttgggcagaaaatccagcagaataacatcgtccatgccttcataatgaatgcgttccagttcgctggcattgccagaaaccagccacggcgcatgaccttctaccggaatatagcgacgcttatataaaaagatttggctgtcttcggcctgggcgttaacaaacgtcattaaggagcctggcgggcaataaagatagccaccttcgcttaaggcaaatgttttcccttcggctttggcagtgatatttccagagatcacatacaggaacgtttcaatgccttcgccaccgaagccctgttggttgccgccgttttgatgcagtgtgaccagataatcaacaaaagaggcacccagctttggcgtggagaggattgtcgcgtcacaattttcaaagcccggaataatattttttaccagaccgtctggtgttaacagtgcgaaattaccgtgtttaacaatcgcacggttagccagtaaatcttcgcggtaaccggtgacgttatttaaatatcccatttataactccttatttctgccaggcaagttgataaagcatgagtgccaacgttttgaccccttcggcaaggtcggtaatattggtgcgttccgccgggttatggctgatcccgttgatgctgggaatgaaaatcatgcaggtcggcacgcgaggcgcgaaaatttgcgcgtcgtgcccggcaccactgtgcatcacccggtaattcagtttttcgctttcacacaattctgtcagggtggcgaccagctccttattcatcggcacgggttcttcgtccatccataaatcgatatcaataccaatatccatttcatcgcaaatcgcccgcatgtcgttttctaactgttgggtgaaatcgcgcagcacggtagcgtcggtatgacgacaatcaatggtgaacgtggttttacccggcactacattcaccgtattcgggcgcggctctactttgccaaaggtcagaaccagcgggtcgcccatctttttcgctttttcgacagactgatggcaaatgcgactgaaagcgtaaaccgtatcacgacgataacccatcggcgtggtgcctgcatggtttgattcgccattcagcgtcaccgtataacgacgctgcccgacaattgcattcaccacgccaattgattgcccattactttccagcacacagccctgttcgatatgcagttcgacaaaggctttaatatcctgacgcggagttagtggggcgttcggcagagtaaatccgcaagccttcatcgcatcgacaaaactatttcctttggcatcacagatattccgcacgtcgtcaggattcgccagcccaaaaatatttttactgccccagaaaacatacgggaagcggctgccttcttcttctgccatcgccaccacttcgaccgtacgtaacggcgcgccgtattgcgttttcagccagtcaatagccagccacgccgccagcgcaccgaattgcccgtcgaggttaccgccgttaaccacggtatcgatatgcgaaccgctcagaaccacttcctgtggatattcggtgccactcaggcgaccgtataaattccccacttcatcgaaacgtgtttccagcccgcttgctaccattctttttttaaactgctgctgggtttccagccattccggcgaataaagtaaacgggtcatcccacccgctgggtcagcgccaaaagaggaaagccagggcagcgtttcttctatagcttgacggaaatgtgtaatcataagaaagtcctgtctcaataattattgcgcaaagggatttttcgtttcgtatgacgtgttataaagcgcgtcggaaattaaatactggtaaatatcatcaacaatttcgatgccttcgacggcggctttgcgttgtttaatatcctgatcctgtccgggataataaacctgattaaaaccgggcgcgggggtaatggtatttaattcgcgcatggtctggctaagatgttgacggaataattcgctggaggagaaaaagttcgggttaataactatatgtaattgccccaaattacgcccggcgtgtaaatcgtcatacatcgaactaacctgtcgcccgaacggtaagccgagtaagacgcctgagaggacgtcaatcatcatcatcaggccataccctttcggcccagcggcggggagcagagcatgtaccgcgaacggatcggttgttggtgcaccgtttttatcgactgcccaggtatccgggatagacatattgcgcgagcgggcgtcgagcacttttccccatgcctgtacggtagtcgccatatcaaaggtaaggatctcgtcgccttctcccggcgcggcaaaggccagtgggttagtgccgtagtaaatttccgcgccgccaaacggcaccaccattggatcggactggcacagcgaaatgccaattaatccggcgcgggctgcctgctgcacaaaataagagattgcgccgctgtgacccatccggctgataccgaccaccgcaacgcctttttgctgggcggttttgatggcatgttccatacccattttcgctgcgacctgtccggcggcattgtcggcatgtaaaattgccgagcacggtccggtttcctcaagacgaaactccggttcgcggttggtgccgccttttgaaatacgttcggcgtagtattcaacgcgcaccgcgccatgagagtggatccctctggcatcggcgtaaaccaatacttcagccacggttgcagcgtgctcacgttttaacccagcctggcagagtttattctcgattagctggtggagtgtttcccgactgattttcatctgtcttcctttttaacgacggtgtgaagcatgactgcaattaacatacagggaaaatatctggattatgtgatccagacaggcaaaaaaatatagttagaatttatttgataatcttcgtgcttttaacctggtttttaaaacaaccatgcttattaaaaaataacgcgtaatagtctggcggttatttgaattcttttgttaataattcccgtgtgatattcatcaccttatttactcgttgtcatcgataccgtaatcgccacattaacactgctcgtgcaattgccatgggtgcaatttttaaggagttgttatgatccacgcctttattaaaaaagggtgttttcaggattcggtcagtttaatgattatttcacgaaaactcagcgaatcagaaaatgttgatgatgtttccgtaatgatgggtacgcccgccaataaagcgttattagatactacaggtttctggcatgacgattttaataacgccacgccgaacgatatttgcgtggcaattcgtagcgaagcggcggatgcggggatcgcgcaggcggttatgcagcagcttgaagaggcgctaaaacaactggcgcagggttcaggcagcagccaggcgttgacgcaggtgcgtcgctgggacagtgcctgtcagaaattacccgatgccaatctggcgctgatttcagtggctggtgagtatgcggcggagctggcgaaccaggcgctggatcgcaacctcaacgtgatgatgttttccgataacgtcacgctggaagatgaaatccaacttaaaacccgcgcgcgggaaaaaggcttgctggtgatggggccagactgcggtacgtcgatgattgccgccacgccgctggcttttgctaacgtgatgccggaaggcaacattggcgtcataggcgcttccggtaccgggattcaggagctgtgctcacagattgcgctggcaggggagggaattactcacgcgattggtcttggcgggcgcgatctcagccgtgaagtgggcggcatcagtgcgctaacggcgctggaaatgctcagtgcagacgagaaaagcgaagtgctggcatttgtttcaaaaccacctgccgaaactgtgcgtctgaaaattgttaatgccatgaaagcaactggcaaaccgacggtggcgctgtttttaggttataccccggcggtggcccgcgacgagaatgtctggtttgcctcctcgctggatgaggccgctcgtctggcttgtctgctttcacgcgtcactgcgcgacgtaacgcgatagcgcctgtcagcagcggatttatttgcggtttgtataccggcggtacgctggctgctgaagcggcgggattacttgccggacaccttggcgtggaagccgacgatacccatcaacatggcatgatgctggacgccgacggacatcagatcctcgacctgggcgatgatttttacaccgtcgggcgtccccatccgatgatcgacccgaccttacgcaacctgttaattgccgatctcggcgctaaaccgcaagtgcgcgtgttgctgcttgatgtcgtgattggcttcggtgcgaccgccgatcctgccgcctcgctggtgagcgcctggcaaaaagcctgtgccgcgcgttcagacaatcaaccactgtatgccattgccacggtgacaggcactgaacgtgacccgcaatgccgctcgcagcaaatcgccacgctggaagatgcggggatcgcggtagtgagttcgctgccggaagccaccttgctggcggcggcgttaattcatccgctctcgcctgccacacagcaacacacaccgtcattactggaaaacgtcgccgtgattaacatcggattacgcagctttgcgctggagctacaaagcgccagcaaaccggttgtgcattaccaatggtcgccagtcgccggcggcaataaaaaactggctcgtttattagaacgtttgcaataaggggttcccatgtttacatcagtggcgcaagccaatgctgcggttattgaacaaattcgtcgggctcgtccacactggctggatgtgcaaccggcttcttcacttatcagcgaactaaacaagggcaaaacactgcttcacgccgggccgccaatgcgctggcaggagatgaccgggccaatgaaaggtgcatgtgtgggcgcatgtctgtttgaaggctgggcgaaagatgaagcgcaggcactggcaatgctggagcagggggaagtgaacttcattccttgtcaccatgtgaatgctgtcgggccaatgggcggcattacttctgccagtatgccgatgctggtggtcgagaacgtgaccgacggcaaccgggcgtactgcaacctcaacgaaggtatcggcaaagtgatgcgttttggcgcttacggcgaagatgtcctgactcgccatcgctggatgcgcgatgtgttaatgccagtattaagcgcggcgctggggcgcatggagcgcggcatcgatctcacggcaatgatggcgcagggcattaccatgggcgatgagttccatcaacgcaacattgcttcctctgcactgttaatgcgtgcgctggccccacaaattgctcgcctcgatcatgataaacagcacattgcggaagtgatggatttcctcagcgtgaccgatcagttcttccttaacctcgcgatggcttactgcaaggcggcgatggatgcaggcgcgatgatccgcgcaggcagcatcgttacggctatgacccgcaacggcaatatgttcgggattcgggtcagcgggctgggtgaacgctggtttacggcgcctgtaaacactccgcaaggtctgtttttcaccggcttctcgcaggagcaggcgaacccggatatgggcgacagcgcgattaccgaaacctttggtattggcggagcggcgatgatcgcagcgcctggcgtaacgcgctttgtcggtgcgggtggcatggaagcggccagaaccgtttctgaagagatggcggaaatttaccttgagcgcaatatgcagttgcagatcccaagctgggattttcagggcgcgtgcctggggctggatattcgtcgcgtggtagaaaccggcattacgccactcatcaataccggtatcgcccataaagaggcggggatcgggcagattggtgcaggcactgtgcgggcaccgctggcgtgctttgaacaggcgctggaagcactggctgaaagcatggggattggttgaggaacgcacaatgacgatcatccatcctctacttgccagccgtagcgcaccgaattatcgccagtcctggcggttagcgggagtgtggcggcgggcgattaacctgatgacggaaagcggcgaactgttaacgctgcatcgtcaggggagtggtttcggccccggcggatgggtgcttcgccgcgcgcaattcgatgcgttatgcggtggattatgcggcaatgaacgaccacaggttgtggcacaagggattcgcctcgggcgtttcacggttaaacagccacagcgttattatctgctgcgtattacgccgcctgcgcatcctcaagcgcttgccgttgcatggatgcaacgcgcggaggaaaccgggcttttcgggccactggcattggcggcaagcgatccgctgcctgctgaattacgccagtttcgtcactgttttcaggccgcgctcaatggcgttaagaccgactggcggcactggctgggtaaaggccccggattaacgccaagtcatgatgacacgctgagcggaatgctgctggcggcctggtattatggggctttagatgcgcgctccggtcgcccgttttttgcctgttccgacaatcttcaactcgttaccactgcggtgagcgtcagttatttacgttatgccgcgcaaggatatttcgcctcgccactcctgcactttgttcatgctctgagttgcccgaaacgtaccgcagcggcgatcgattcgctgctggcgctggggcatacgtcaggggccgatacgctgctggggttctggcttggccaacaattattacaaggaaaaccatgaaaacactggttgtggctcttgggggtaacgccttactccagcgcggtgaggcgctgacggcagaaaatcaatatcgcaatattgccagtgctgtgcccgcgctggcgcgcctggcccgttcttatcggctggcgattgttcacggcaacgggccgcaggtggggctgctggcgttacagaatctggcgtggaaagaggtagaaccgtatccgctggatgtactggtggcggaaagccaggggatgattggctatatgctggcgcagagcttgagcgcacagccgcagatgccgcatgtcacgacggtgctgacgcgcattgaggtttcgcctgatgatccggcgtttttgcagccagagaagtttattggtccggtttatcagccagaagaacaagaggcactggaagcgacttacggctggcagatgaaacgtgatggtaaatatttgcgccgggtggtggcgtctccgcaaccgcgtaaaattctcgacagcgaagccatcgagttgttgctcaaagaggggcatgtggtgatttgcagtggcggcggcggtgtgcctgtgacggaagacggggcagggagtgaagcggtgattgataaagatctcgccgctgcgttgctcgccgagcagattaatgccgatggactggtgatcctcaccgatgctgatgcggtatatgaaaactggggaacgccgcagcaacgtgccattcgccatgccacaccggatgagttagcgccatttgccaaagccgatggttcgatggggccgaaggtaacggcggtgagtggctatgtcagaagccgtggtaaacccgcgtggattggggcgttatcgcggattgaagagacgctggcgggcgaagcggggacttgtatttcgctgtagtgatgggcaccaggcaattggcacatctagcctgatgcgatgctggcgcgtcttatcaggtctacaggcggtgtcggaacggtaggccggataaggcgtttacgccgcatccggcaagaaaatgagcatcaattaactgaacttgctctgcgcccacatcacgccgctggcatactccggcggcagcagtgggattaaggcttccagcgtcgcggtcagacgcgatgtgtcgctgtcggtcaaattcaaatgccccactttacggcccggacggacttctttgtcgtaccagtgcagatgcacaagcggcagtttcagccagtcataattcagatcgctaccaatcagattgatcatcaccgacggattattcactactggttgcggtaacggcagatcggtaattgcccgcagatgtagctcaaactggctgatgctggcaccgttttgcgtccagtgaccgctgttatgcacacgcggagccagttcgttgatcagcagaccttgtggggtgacaaaacactccattgccatcacgcctacatagctcagctcctgcataatcgccgacaacatctcttcagcttgcgcctgcagctgtgcgttggcctgcgggaaagcgacgctggtgcgcaaaatgccgtcctgatgcaggttatgcgtcagcggataaaacacggtgctgccatcaaaaccgcgcgcgccaaccagcgacacttcaccagagaagtttatgccctgctcgacaatacattcgccgtagcattcagcaggtaactgttcggtttcatcggcgcgtaaacgccattgaccgcgtccgtcatagccaccagtgcggcgcttaacaatcgccagctcacctaaacgatcaaacaccgcaggccactcgctgcgttcggaaagtaactgccacggtgcggtcggcaggtggagcttatcgaaaagctgcttctgagtcagacggtcggcaataatcgggaacacatcgcggttcacaaaggccggatggcgcgccagctcgcgggttaatgcagtttccggccagcgttcgatctcagcggtaatcacgctttgttgaaaaggcaccgccgccggttcagcgtccagcccgaccggccagacagcaatgcctaacggttcgcctgcctgacgcagcatacggcctaactgcccgttcccgaggacgcaaacctgtttcatgccgcacctcgcgggtccgggttttccagcacttcatcagtttgtgctttgcgccagtcattcagacgctggtgcagttctttatcatgattcgcaagaatttgtgctgccagtaacgccgcgtttgccgcgccagctttaccaatcgctagcgtacccaccggaatgccgcgcggcatttgtacgatggagtagaggctatcgacaccgctcagtgcggcgctctgtactggcacgcccagcaccggcaccagcgttttggcggcaatcatgccaggcaggtgcgctgcgccgcctgcgcccgcaataatcacctgataaccgttctcttcggcgctttcggcgaagctgaacagtttatcgggggtgcggtgagcagaaaccacttcaacgtggtgcgggacattcaggatttcgaagatttcggcggcgaactgcatggtagcccagtcgcttttggaccccatcacgatggcgacacgcgccggattattgcgggaagacatgcgtcttaaaactcctgtggtgcacaactctcggctttagagggcacagagaatagcacggaaagagtgcaaggaaaacggttgcgtaggcggaattaaccgtcagttgttgagtttttaatttgttctgcgtgttgattatgcgctctggctgaactggcaaagaatgcccatatcaacacaatgctccatggaaaaaagcaaataccgacaatcaatataaatctttctacaaaacgttggttatgggggcgggtgagtactaaataaatgagccagaaatagactatccaggaaatgaccgccgcagctaccagtgacaatgcgccaaaatagaagccgacaagaccgaaccagctaatacacagtggcgctcctgccgtaagggcgatgccagaaatcaaaaatccgttgcagcgttgcataataatattccctgttgttatttcactcagagattattaccttgctgattttaaaaaagatatacaggttgcgttagttcggtgctttttcagaatctgtccattcgtggtcagaaaggaaaatggattagctcaacgtcatccgccgtgactttcaccatcgaaccttctgtatgccaggcacccagtaccacgcgaaaagccgtttgctgattggcgataagttcatgcaccgccgggcgatgggtatgcccgtggatcagccattgcacttgatgtttttccatcgcactgaccaccgcgttttggttaacgtccatgatcgccagcgatttactgctgttggcttctttactgttcgcgcgcattcgcgcggcaatgcgtttgcgcacaaacaacggcagggcgaggaatagcgtttgcagccagggtttgtggactttggcacgaaaagcctgataacccgcgtcatcggtgcacagcgtgtcgccatgcataatcaacacccgacgaccataaagttcgagcaccttttcttccggcaataacgtcatgccgctttcacgggcaaagcgtttgccgagcagaaaatcacggttgccatgaatgaaataacagggaacgccggaatcggataccgctttgattgctgcggccatctggtgatgaagtgggttgggatcgtcgtcgccgatccaggcttcaaacagatcgccaagaatatacagcgcatcggccttgcgggcctcccccgctaaaaaacgcagaaaaccggcggtgatcgccggttcttccgcgcagagatgaagatctgcaataaagagtgtcgccacgattactcgctaacggtcacgctttcaatgataacgtcttcttttggcacgtcctggtgcataccgctacgaccggttgcaacacctttgattttgtctaccacgtccatgccttcaaccacttcagcaaatacgcagtagccccaaccttgcaggctttcgccagagaagttcaggaagtcgttatcaaccacgttgatgaagaactgggcagttgcagagtgcggtgcctgagtacgggccattgccagcgtaccacgggtatttttcagaccgttgttggcttcgtttttgatcggttctttggtggctttttgtttcatgcccggttcaaaaccgccgccctgaatcataaagccgttgataacacggtggaaaatggtgttgttgtaaaaaccttcgcggcagtagtccaggaagtttttaactgtttcaggtgctttatcgtcaaaagttttgatgacaatatcgccgtgattggtgtggaaagtaaccatttttgcatcctgttccgtttgattggtgcttcaacccggttcgggtcatatatagggtggtgttatagcataaccgcacgatcggatcatctcgcaatgtatgctgattcgcgcgggaaatatgggtattatacgcaactcaattacccacacatgtctaaacggaatcttcgatgctaaaaatcttcaatactctgacacgccaaaaagaggaatttaagcctattcacgccggggaagtcggcatgtacgtgtgtggaatcaccgtttacgatctctgtcatatcggtcacgggcgtacttttgttgcttttgacgtggttgcgcgctatctgcgtttcctcggctataagctgaagtatgtgcgcaacattaccgatatcgacgacaaaatcatcaaacgcgccaatgaaaatggcgaaagctttgtggcgctggtggatcgcatgatcgccgaaatgcacaaagattttgatgctttgaacattttgcgcccggatatggagccgcgcgcgacgcaccatatcgccgaaattattgaactcactgaacaactgatcgccaaaggtcacgcttatgtggcggacaacggcgacgtgatgttcgacgtcccgaccgatccgacatatggcgtgctgtcgcgtcaggatctcgatcagctgcaggcaggcgcgcgcgttgacgtggtcgatgacaaacgtaacccgatggacttcgttctgtggaagatgtcgaaagagggcgaaccgagctggccgtctccgtggggcgcgggccgtcctggctggcacattgaatgttcggcaatgaactgcaagcagctgggtaaccactttgatatccacggcggcggttctgacctgatgttcccgcaccacgagaacgaaattgcccagtccacctgtgcgcacgatggccagtatgtgaattactggatgcattccggtatggtgatggttgaccgcgagaagatgtctaaatcgctgggtaacttcttcaccgtgcgtgatgtgctgaaatactacgatgcggaaactgtgcgttacttcctgatgtcgggtcactatcgcagtcagttgaactacagcgaagagaacctgaaacaggcgcgtgcggcgctggaacgtctctacactgcgctgcgcggcacagacaaaaccgttgcgcctgccggtggcgaagcgtttgaagcgcgctttattgaagcaatggacgacgatttcaacaccccggaagcctattccgtgctgtttgatatggcgcgtgaagtgaaccgtctgaaagcagaagatatggcagcggcgaatgcaatggcgtctcacctgcgtaaactttctgccgtattgggcctgctggagcaagaaccggaagcgttcctgcaaagcggtgcgcaggcagacgacagcgaagtggctgagattgaagcgttaattcaacagcgtctggatgcccgtaaagcgaaagactgggcggcggcagatgcggcgcgtgaccgccttaacgagatggggatcgtgctggaagatggcccgcaagggaccacctggcgtcgtaagtaattgcgctattgccggatgcgagttttcgcatccggttatcgcctgcgccaccacaacattcccatcagtagcatccccggcaaccacacccacatcaattcagaaataatcacctgatgcccgtacggcgtggtgtaacgagacaatgcaaacggcgcgactttaatcacctgccagggagcgaaaaagcgttcatctgaccacggccatatccagccaacgcctttaccaccagtggttaccgaatccagcaagctgtgcgatagcaatgagacggttaaaaacagccagcagcgaatcagcccagccctgaaccatcgacgtccaatcagcacacataacagcgggacaacaaacgcaaacaccagctgaatgggtaaacccgcgatgaccaaaaacgttgccgtaagcaacgccaaatttaaacgataatacgtcggcatcaggcaacatcgccaggacgattccggcaaataacagacgcggtgggatggctttctaacccaaccctaaaccaatgcataggggaacggcggcgtgcgtaataacggttggcatgatggtcgcttcggcaaaatgtcgatgctatcagcatggatgaacggggcgtagagggcaaaagtctgaaaagagaaccggcctgttgatacaggccgggaaagggatcaggcaacaacctgtacggtgtgacctgcaaaactcactgtctgaccggcgacaattttgcagcgtttgcgcgtttcaaccgcaccgtcgactttcacctggccttcggcaatcgcgattttcgcctgcgcgccgctttcgctccagccttccagtttcagcaagtcgcacagctcaacgtgcggatgtttacctaaagaaaatgtcgccatgttactcaccctgtggatcatgatattcaacgcacgcctgtagcgtgttttcaatcagcgtggcaaccgtcatcgggccaacgccgcccggaacaggcgtaatgtatgaggcgcgtttagccgcgtcttcaaacacgacgtcgcccacaactttgccattttccagacggttgatgccgacatcaatcacaattgcgccttctttgatccagtcaccaggaataaagcccggcttgccgacggcaacgatcagtagatcggcattttctacgtggtgacgcagatttttagtgaaacggtgggtcacggtagtggtgcaacctgccagcagcagttccatgctcattgggcgaccgacgatattcgatgcgccaatcaccacggcgttaaggccaaaggtatcaatgttgtaacgctcaagcagcgtgacgataccgcgcggggtgcagggacgcagacgtggcgcgcgctggcacaggcgaccgacgttgtaaggatggaaaccgtccacgtctttgtccggatgaatacgttccagcactttgacgttatcaatacccgccggtaacggcagttgaaccagaatgccatcaatggtgttgtcggcattcagcgcatcgataagctccagcagctccgcttcgctggtggtttccgggaggtcataagagcgggagacgaacccgacttcttcacaagccttgcgtttgcttgcgacataaatttgcgatgcagggttgctacccaccagcacaacggccagtcctggcgcccgcagtccggctgcaatacgcgcctgaactttttgagcaacttcagagcgcacctgctgcgcaatcgttttaccgtcaataatctttgctgccatcagagagaggattccatctgttacgtaggtcgaaggggatgtgtctattttgtcagaagcgtggcgcgctgtcagttttcgttttctgaaaagtaaaaccttctgtacctggctgattcacacctatcatgataaccgtcgttggtttgccgccatagtgagctacatcagatgcggtcgtacacttgttcagcaactggttcaaaagccattgactcagcaagggttgaccgtataattcacgcgattacagcacaccgtggtatcaatgcgcccttagctcagttggatagagcaacgaccttctaagtcgtgggccgcaggttcgaatcctgcagggcgcgccattaaaattcaatcagttacgccttctttatttcttctataattccagagtgggacattatcaccaaaaatgtcgtctattttcctcgcgtgctcagtcaaatgattaggcgcaaggtgagcatatctacgaaccatttctctggactcccatccgcccatttcctgaagcactgataatgggacgcctgacggaatcaacctgcttgtccgggtatgccagaggtcatggaaacggaaattttcaactcctgcacgacgacaagctgatagccatgctgtcttgctgtcaatgcgcatcttcctgagcgcaggcattgatgttccatctgctcgcttagccgccctggtatgtacacccacatttgtgatgcttgcctgtttgatcatgcagcactttagaggcggtatcgttcagcgccacaccaatggcgcgatttgatttgctatcttctggattcaccctggcaacttgtcgctgcatgtcaatctgttgccactccagatttatgatgttcgactttctcagaacagttaccagcgcaaacttgacgacagatttcagtggcttggggctctcatcaatcaggcgtttttcctgattcttttgtaagtctcttgtgccattccacctcatacaggtttgcctgcaaacagtactgatattgcactgccagatattccggctggcttcgtggttgttttcaacagtgatgaggcatcgtggcatctcgttgaagaccatcggggtaaaacggtttatgacgtggcatcaggggacgcgttatttatttctgagctcggtccgttaccggaaaatgttacctggttatccccggcaggggagtttcagaagtggaacggcacatcatggataaaggatacggaggaagaaacctcgttgctggaagcctgtaagatgtatcgggtgttgctgaaccgagttgatacatcaactgcccctgatattgagtggcctgtgaaccctgtcagagagtaatcattgggattatgccgcagcacgtcgtgcgcaagaacgtgctgcggctggatgctattttttccctgaagcggaaaacattactacagtacctttaaccttggttttaacattctcgaaatgctctgagagtatatgtgttaagccttcttcggaatcttttgtgtttgaaaagatgcctttctgattgtaaatgcgcatcagtttttgaccgaagctattgtgcacaacgccgtcaccaagaattgtggctccgtatagagttccatcgtcagttaaggcctgcgccgcattgcgtattacacagctttttgtagatatatttccaggcaggcagtgaagaaggtaaaacatggaaatggaatcaaattgaccatgtaacgccgcgggataaggatcaaaaacatcatggctaattttatgtttaatttttgattccccagcccttgtcgatgccgcgttcaggctagcttcgttcaaatccattaaagatatcagactactctcaggtacgtgagtaaggtaaaacccagttccaacgccaatatccagatggttgttacctaaatgttccagaaagtgtggaagaaggtgttcctttgtaggacatccccatgcaagccgatttgatactcccaaaacccaccagtcataaagctttagggtaagtggtgtgtaaattttagccccatcatctgtgttttttttcattagtttcaccgtgttatagttttatttgtgaattaaatcaattatagagatgaattacaaggggttaaatgatgccacggcataacgaatttgaatatattgggtcttgtgttgcggtaagaggttacacgccaggacgcaggttaaatgcttacaatattaggggatattgtttgcttttaacggtaaacaaattccccggggctatacaataccaccggggagaaaatctatttaacgttgttaaaaggtgtacttaagaccagcagtagtgatgaagttatagttttctatgcctgcaccatttttgctgtagtcagaagtgttatcattgtgatcataaagtgaagtatcaccttttttattcgtaacccgattccatgcgccttcaatataaacttttgcattaggcgttacgtaataacctgcattgactgcaacagaatagtaattttggtctttgactttactgcgataagtgattctttttcctgggtcatagtgttcatcgttatcaaatgcttccacccagccgctgtatttaaatgtaccacctagctcaaaatcttcataacgataacttccagtcaagccaatgtagggcattttaaaacgttgtttgtagccgattgctctttctccattcgggaaggagccgatatcatctctgaatccctcctcagaactgtagatataggaaccccctctggctgtaaagctataacggctttcctgatatccggccatgagtcccaggcggtaattgggttcgttgaggagccagcctttgatattcagatcaaattcgttggcataattgagttgtgtatcagggtgtctactttcatccgtccaggttccggggttactggaatccatccagtcccgatcgaccatattgccacctcggctaccgagagttgtccagccagcagccccgatagatatctggggcatcaaatcccaattaattgcacctttaataattgcagcgttattgaatttccagtcaagttgactgacttttcggcctccttcttcggctagataaacacgctcttttgtttttccgctcagagttccaagactaatgtccgcatttatgttgtcaggagtaaacgataaagtctcggtagaagcaaaagagctgatcgcaataggggttgtcaggactattcccagaagtttcgcccgcataaaaggtctccattcaatcgttttaatgattgagtatgtattttttatatctaacttaatgagtcaattgtatattgccccactgtttatattttgtttaacattgaatttttgtcacaatgcgctgtcagttttttagtttaattgtctgtttgtgttttgtattgtggttttatgggctaattatttttttctttgtggagtttttatctattcaagtgccatgcctttagatgcatattagcgataatagcatgaggtttatcctcaattgctgtgttttttagtataaaaaagaggaacaaaactgagacacataaggcctcgcaatggcttgcaaggttttacatattttgaggtggtggaacgtgtgaacgcagagatggcgcggtaatttgttgatttaaaatgtcgttcttggagtttctaagtcgtgggctacaggttcgaatcctgcagggcgagccatttcctcgccatttatttgttcccttttacaaattacaccatcactttgttgtcgcggttttgctaaataattggaacacgtcagacgaataaaatgaaaacagaaattctgctaaacaattcatcttgccaggattttgattaggaaagtgaaaaggaaaggagcaagctaagttgctccctttaatcattaatactcaaggatactctgcgcggcgggcaaatagcgcagagagaaatagagcgtgtctttaccgcaagaggaacgtttcgctaacagcgaggcaatttctgcgttcggtttcggtttcgctgtaaacgttttacctttaccagcgacaaacagttcataaacaatgccgcttgctggggcggaactttggcaatcggcgctggcctgtagataacgttcacgctgttcagcggtcagtttatccacgccgctgccatcctgtacccagacattaacaccggttgctttaacttgttccagcagttggcgatagccatctggcgacatgtttccggcgaaaaaactactgatataaaccggttttgctgaaacatcgctaatcaaccgctgcgcgttgtttaaccatgttagcaaaggctgacgggcggcttcgctgcgccagttcaggtcgtcaatttccgcgctgatgtaccagccatccggcgttacgccaggcacggcgctccataatctggcttgctggagatcggcagccagcaggcgattaagatagctttccagcgctgcggacgactgtttctggtgcataaaaaattccggatcggcgttcagcccgacaatcagcttcaggccagcctgttgcgcagctgtagcacgcttaaacaataacgcgcgctgttctggctgggtgaatgcatcgccgtaacgggtccattgcaaaaccagggtatcgaagccttgcaaacgtaactgactcatcagcccctgccactgggtatcggtaacctgactatcacggttttgtggttgccagataatacctttcatcgcaaaggaaaaagggctgaccaaaagcagtgtcaacaatacgaaaatgaacttacgcatttaccagtgcactccaatggtgagaaacgcgttgttgcgctctccgttacgttgattaatcgccttaaaggtatgttgatattcgacgccgagactgactttgtgcggccaggcgtcgtagtgcgtctcgccggtccagatattccagcggaccccgacaccgccaagctgcgcgccctgagtgcctttatcacgataaccgttgtcctgaacgtgagcgtaaggctcaatagtctgtccgttcgccaccttctgatgccagcttacgcgataatctgccgtccacgcctgaatatcctggcggacatattgcgccgcatcgaggtacaggttttgggcaaaccagcctgaaccgttcgggtgccattcgtcgctgtatttgccgccattaaagaatgaggcgctggcgcgcagcatggtatcggatgcgccattttgcccgttcagcggcaactgctgttcgacggcgaggaaaaagatctgatcgcgcagcggcttccagcgcagaccggtgccggacatcggatttttcaccggcatcatcaccccgttttctccggtatcggcaaagacgcggctataaactgagagcaggtcgccttccagcagcatattgcgtccgaggcggtactcggcttccagttgcccgtagctacgatagcttttccctggcgctgcgccgccgacattattgttagcggtactcattgcgccggaacgcaagccgatagaagaatcgaaactgaacgtccagcggcgaccgacctcctcatgcagacggcggaaattgaagcgttgctgattttgctctggagtcagtggggttatcagcgcctgattatcaatgtcatcaatcaccagccgggcgtagtgctgcgtcgcaggcatgtcatccagacgctggttcacgtaggccagttgtcggataagtgccggatcgtccggtagccctttatgcgcctgttcgagcatttcccgcgactgtgcgatatcaccgctatcccacaaggcgtaaccgagcgctgcctgggtgttgctattattcggttccagttccagcgcggcgcgcaaatcactcaccgccgccgggacattatgacgttggcgataaattgtcgcccgcgcaacgtaagcgttggcagaaggcgcaatattgattgagcgcgtgagatcgttcagtgcaagttccggctgaccaggaatgtaacgttgcgcatgcagccaccagtagagggcattgtttcccagcccacgttgttctgcctgctgaagccagcgatcgcgagccgcaccatttcctgccgcctgggcggtattggcagcagcaagcagatcctcattgctcatgtcgtgaagactgattttctgccaggccgccagtgcggtggcgtagtcctcaacctgatacgcctgataggctaccgcacgatgttgccaggcgtccggttgtcgttgttcggcctgaagccatgcatacaacgccacaccgggtagcgtgtcccgataacactttgccagacggttccaggcggcggcatcgtaggaaggcgacatatcgcccagcaagcgaactattgccgggcaattatctgcaatacccggcaactgactttgccactgacgttgctccgccagcggtaagggtttcgataaaatcgccaccttcgccggcgttgccaggtaaggatgactttccagcagagacgccagtcgcgccattaaagtctggctgacacgcgcatcgccctggaaaggatagcgttgcagcaataaatcggcagcttcgcgtgactgttcgttctgcatcagttgccaggtcagttgatccaggcgggtaagatttgccggttcttgctgatacagcaatcgtgccagacgcagagcttcagccttgttatgggtcgctacgctaacggtataacgctcctcaagcatttcattggcggggagggtggcgagcagtttttgcgctgcgccgtactgaccttcttttaacagcaccggtagcgtcgcgccaacaacatactggcggttgtcggcaaactgtaccgtataattcgccaacgcctgaacggggttgccgctgtatttagataacagatagagccaacttttctcttgtgcgtccgtggtaaatagcggcgtattttcaatgagataatgctggaggcgtgctttttcgccacgataagccagcgcggtcgcgtaagtaatatatgactgaggatcggtgaagatcccctgtgattgcagcgccaggatccgatcgtccaactgcccggcaagaagcacgtcaaaccactgacggcgttctgccgcgcttaatgtgttctgctggcgtgcttcattgtatagcgtatctgcctgggaccattgtttcaggtagattgcgcgttgcagcagatcggttcgcagcgtttttccttccggcgatgcagcaaacgtcgcatcgttcagttgcgctctggcgacaggtaattgtgccagccgcagggcattctgcccgacttcactgcgacaacgcagggtcggcgcagcatcgcacgctttttgctgggcaagcagttcttcaacagtcgtaacgcttttcacttcaacaggaatagccgccagactgcgctcaagccgatcatctccagggtgacgtttcagttgatcctcaagcaacagccgcgcccggtcatcatgaccaaaatggcgataggcttccgcaaggtataaagtcagcggaatattatccggcacctgctggtgtatatattcaaattcgcggatggcggttgcttcgtcgttatttttctgtgccttcagcgccttatcgagacggggataaataacaaaatggcgataatcgctcagccccagctcttctgcgctggtgccgatattgtctgcgagtgcgctggtactcaataaagatgtcagcagtaaaccagaccatccgatgacgcgattaaggttattctccttcattttcggactccagttgtgcaacctgttcagtgtttaaacctgctttgagtaatagtgattgcatcgaaacttgtaattcgcgttgaattgtcaggacgcgatccaacgtttcctggctgataacgccttcggtgaccaaaaacttgccgagcggcagagaactgcgttcatggcgcaataacaacacgttaattgctgaacgattaatatgaccgagcgtggtcagtatttcggcgaacaggaactgatgcggcacatattgccgccagatttcaccggcctgctgttccgtgagccactgatgctgaactgcattgtacaacattgcccgcggatcgtgaccgcgtcggcgtgcataccagtggcgtaatccggtgacaatttgtccccgcagaacaatgacgtaacgcactttgcgtccgactttacgcgtcagggccgccagcgaaaccgggtcaataccatcttcactgccgacaattaactcatcattgtccagacgcagcggcagtaccgcataatgcagcgccacggaggccggcatttcggcaatcagcgaggaagggatctgccaggcatcgatggattcccacgccacgccgttttgctctgccagcgcctgtgccagttgctcggcgctaatcagcccctgcatcagcattgaaccgcccaggcgtagaccttcgacgcgattacgcagtgctgtatcgagttgttcttcagtgatgacctgattttccagcaggatttgacctaacggacgcaacgagcgggtatcgccagtcacgctggggaagtcatgcgttgttttatcccacgcgacgcgacgtggatcgccgtgttgaagtacctgttttaacgcgcgccagttggccatgaagttaatcaggttgccccagaaaagacgcaggacagatagcagcccctgcgtcaggccgtagtagccagtaacgaaaatcacccgctgcacgatgcggttaatcatcaagccaaagtttagccacagcagagtcattaaccatgcgctgccgctgaaaatagaaaggaaatgccaggcatcgggccacaaactttcatacgccagcaacagcaaaagctggatcatcaccagcatcgcgaggaagctgacaaagttactgattgcccctttgcggtcgcgccagagaaagtagttcagcgtcaggctggaggtccatttgtgggttttaaagccctggaaaacaatgccgatgatccagcgagatttttgccgaaccgcagtcgaaaaggtatcggggaaatattcgcgcacgcagatcatgtttgacgtccgtgcatgctgtaaaaatttacgctgctcgcgttctttggcttcgtccaccaccggaaaacggacaaaaatttccgtcatacctttctctttcaggcggaagccaatgtcgtaatcttcagtcagactctgcacgtcgaaagcaataccgtcaccgtcagctaacagtgcggtcacggcgcggcggctgaaacaggtgccgacgcctgcgctgggcacctgtccggcgagggcttcacgcaccggaacatctttgccatgcagttctgaaaactcatcaatgtaggtcatgctggtgaagtgcgtccattcgcgttcgaacggatacactgggatctgaatcagatctttacgctcgaccagatagttgaacagacgcaattccatcggtgaaatcacatcttcggcgtcatgcagaataaaaccagcaaaagcgaaattggcgctacgttcaaattgggtgatggcgtccagcacgttgttcagacagtcggctttgctggtggggccaggacgcgcgcagactaccttatgcacgttcgggaagcgagcgcacacttcgtcaacatcacgctgagtatcggggtcgttggggtaggtgccaacaaagatatgatagttttcgtagtcgagcgtggtcgccgccagctcggccatattgccgatgacgcccgtttcattccacgccggaaccataatcgctaacggtttttcatctggtttatacagttcgcggtaactcattcgcgggtagcggcgataaacactcaacttgcgtttaatgcggcgtacccagtagacgacatcaataaaaaaatcgtccagcccgctgatgaacataatgaccgctaacgttatcgcgattacttttaagccgtagagctaggtagcaaaaacatcaagaagccagtccacacaaaaaccttacattaacgctggttatgtttagggtggcgtatattaaggttttttatgaattgtgacagctttttatcattaataggtattactattgcggcatgttatttttacactggttataaaagttgccgtttgctgaaggattaagcgggtaatatgataacaaaccttgtcccccgcacatctgacgttactgcaactgtgcctttatgcgcgacaacaatcgatttcactatcgccaggccaatgccgctaccttcgccttttcgctggcgggaaggatcaacgcggtagaaacggtcaaacaatcgcggtaagtgttcgggcgcaatgggcgtaccggggttttcgacggtaacttgcaccaggtgatcgaccgtctggcagcgcacaacaattgtctctccggttggcgtataacgcagggcattagaaagcaggttgcttaacgcccgacgcagcatcagcggatcgcccgcaacctgacactcgtcgccaacaaaccgcagctccacgccgcgatcttctgctaacgcctcgaaaaaatcgaacactttgccgacttcatccgccaggttgagcattttcttttcggggattagctggttgttatcggcctgagcgagaaacagcatatcgctgaccattttcgccattcgcgtcagctcttcgagattagagtagagcacatcttccagctccttctggctgcgcgactggctgagggcgatttccgtttgcgtaatgagattagtaataggtgtgcgaatttcgtgggcgatatccgctgagaaattggactggcgggtaaagacatcctcaatacgctcgatcatatggttgaacgacagtaccagctgttccagctcaatgggcacggtctgcgggtcaaggcgaacgtcgagatctttcgaggtgatattctggatttgacggctgacgctgcggatcggcgcgtgacctttatgtaccgccaacagcacgataaagacgatcaggatgctgattaccgatgcggtcataataagtttattcatcaaatcattgatgtaatgaagatgaaaatcgatcgaaagcgcaatgtagagcgtataaatcggtttgccgtcaaccagcgggccaaccggcaagttaatcatccgccagttgctgtgttccatatgcccgtgaccgtgccctggcatcatcatcgttgggccggaaaggagatacacctcgccgccctgcgcgtctttatcgggtatggcgtcacgcgtaaactcgcggatatccggcgcaccgggggagtgatacaccgttttaccgtggctatctgccagagagatcaacacattggaataaccactgacgatatcttccagcgtcattaagcgtcgggcttgcgtttcgtcagggtgattaagtacccgttcaagggtggcgctaatctcttttaaatcattaatatcctgctcggcaaaatgcacttttaccgagtggatcatgatccatgcaaaggcgaaaaacgccgcgatggtggcgaggctgataaaaaaggtcaggcgagttgccagcgaaaacgggcgctgaaatggtttactgaccatccggcacctctagcatgtaacccacgccgcgcacggtctgaatcaactttggctcaaagtcgttgtcgattttgccgcgcagccgcttcaccgccacatcaatggcgttggtatcgctgtcaaaattcatgtcccatacctgcgaggcgataagcgagcggggcagcacttcgccctgatggcggaggaaaaactccagcagagtaaattctttactggtcagagtgatgcgcgtgccgctgcgggtgactttgcggctgacgagatcgaccatcagatcggcaacctgaaactgactttcgataatcaccgccgccccgcgccgcagtagagtgcgcacccgcgccagcagttcagcaaaagcgaacggcttcaccagatagtcatccgcccccaactccagccccttgacgcgatgttcaatggtgccaagcgcggtaagcaacagaatcggcatccccttattggcggaacgcaacatgcgcacgatatcccagccgttcacgtccggcagcataatatcgaggattatcagatcataatcaccggtcatcgccagatggtagccattcagcccgttgtcggccaaatcgaccacaaaaccggcttcggttaaccctttggtcaagtattctccggttttcttttcatcttcgacaatcaacagtttcatatttcctccgcatgttgcccgggcaattctagagtagcgggatcagatggcaatcgcttattggcaaaatgacaattttgtcattttcctgtcaccggaaaatcagagcctggcgagtaaagttggcagcataaaatcaccagaaattatgagcctatgtctccttgtaaacttctgccattttgtgtggcccttgcgctaaccggttgttcactggcaccggattatcagcgtccggcaatgcccgtgccgcagcagttctcactcagccagaacggcctggttaacgcagcagataactaccagaacgcgggctggcgcaccttttttgttgataatcaggtgaagacgctgattagcgaggcgttggtgaataaccgggatttgcgcatggcggcgctgaaagtgcaggaagcgcgggcgcaatatcgtctgaccgatgccgaccgctacccacagctcaatggcgagggcagcggcagctggagcggcaatcttaaaggcgattcagccacgacgcgggagttctcgactggccttaacgccagctttgatctcgattttttcgggcgcttaaagaacatgagcgaagccgagcgccaaaattatttagccactgaggaagctcagcgcgcggtgcatattttgctggtttctaatgtcgcgcaaagctatttcaatcagcaactggcgtatgcgcaattgcaaatagccgaagaaacgctgcgtaattatcagcagtcatatgcgtttgtcgaaaaacaactgttgaccggtagcagcaatgttctggcgctggaacaggctcgcggggtgatagaaagtacccgcagcgacatcgctaaacgtcagggggaactggcgcaggcaaataatgcattgcaactgttattgggaagctacggcaagctgccgcaagcgcagacagtaaacagcgacagcctgcaaagcgttaaattaccggcgggcttgccgtcgcaaatcttattgcagcgccctgatattatggaagctgaacacgcgttaatggcggctaatgccaatattggtgctgcgcgtgcggcatttttcccgtctatcagcctgaccagcggaatatcaaccgccagcagcgatctgtcgtcattatttaacgccagcagcgggatgtggaattttattcctaaaattgagatccccatttttaatgccggacgcaaccaggccaatctggatatcgccgaaattcgccagcagcagtcggtggtgaattatgaacagaaaatccagaacgcctttaaagaagtggcagatgcgctggcattacgtcaaagcctgaacgatcaaatcagcgcccagcagcgttatcttgcgtcgctgcaaattactttgcaacgggcgcggacattatatcagcacggcgcagtcagttatctggaagtgctggatgccgagcgttctttatttgcaacccgacaaactttacttgacctgaattatgcccgtcaggttaacgaaatttctttatataccgccttagggggcggttggcagcaataatttttaactccaggagagaataaatgaaaaaagcactgcaagtcgcaatgtttagtctgtttaccgttattggctttaatgcccaggctaacgaacatcatcatgaaaccatgagcgaagcacaaccacaggttattagcgccactggcgtggtaaaaggtgttgatctggaaagcaaaaaaatcaccatccatcacgatccgattgctgccgtgaactggccggagatgactatgcgctttaccatcaccccgcagacgaaaatgagcgaaattaaaaccggcgataaagtagcgtttaattttgtccaacagggcaacctttctttattacaggatattaaagtcagccagtaacccaggtttaatgagatgaaaaaaatcgcgcttattatcggcagcatgatcgcgggcggtattatttctgcggcaggttttacctggtttgcaaaggaggaaccgcccgcagaaaaaacgtcgaccgcagaacgtaaagtcttattctggtacgacccgatgtatcccaatacgcggttcgataaaccagggaaatcgccgtttatggatatggatctggtgccgaaatatgccgatgaagagagttctgcgtctggtgtgcgcattgacccgactcagacgcagaatctgggggtgaaaacggcgaccgtcacgcgcgggccgctgactttttcccagagtttcccggcgaatgtcagttacaacgagtatcagtatgccattgtgcaggcccgcgccgccgggtttatcgacaaggtgtatccgcttaccgtgggcgataaagtgcaaaagggcgcgccgcttctcgacctgaccattcccgactgggtggaagcgcagagtgagtatttactgctgcgcgaaaccggcggtacggcgacccagactgaaggcattcttgagcgactgcgactggcgggaatgccggaggctgatattcgccgcctgatcgccacgcaaaaaatccagactcgctttacgctcaaagcgcccattgatggcgtgatcaccgcgtttgatctgcgcgcgggaatgaatatcgccaaagataacgtggtcgcgaaaattcagggtatggacccggtgtgggtcactgctgcgatcccggagtccatcgcctggctggtgaaagatgcctcgcagtttacgctcaccgttccggcgcgacctgataaaacactcaccatccgcaaatggacgctgctacctggcgtggatgctgcgacccgcacgctgcaactgcgtctggaagtcgacaacgccgacgaggcgctaaaaccgggcatgaacgcctggttgcaactcaataccgccagcgaaccgatgctgctcattccgtcacaggcgctgattgataccggcaacgaacagcgggtgattaccgttgatgctgacgggcgctttgtaccgaaacgcgttgccgttttccaggcatcgcaaggcgtcaccgcgttacgctctggtctggcggaaggtgaaaaggtggtttccagcggcctgttcctgattgattctgaagccaatatttctggcgcactggagcggatgcgctctgaaagtgctacccatgcgcattgagggaatagccaatgattgaatggattattcgtcgctcggtggcgaaccgttttctggtgctgatgggcgcgttgtttctgagtatctggggcacctggactatcattaacacgccagtggatgcactgccggatctttccgatgtgcaggtgattattaaaaccagctatcccggtcaggcaccgcaaatcgttgaaaatcaggtgacttatccgctaaccaccaccatgttgtcggtgcctggcgcgaagactgtgcgcggtttctcgcagtttggcgactcttatgtgtatgtcattttcgaagatggcaccgatccgtactgggcgcgctcgcgggtgctggagtacctcaaccaggtacagggtaagctgcctgcgggagtcagcgccgagctggggccagatgccacgggtgttggctggatctatgaatatgcactggtggatcgcagcggtaagcacgatctggccgatttacgctcattgcaggactggtttctcaaatatgagctaaaaaccatccctgacgttgcggaagtggcgtcggtgggcggtgtggtgaaagagtatcaggtggttatcgatcctcagcgcctggcgcagtatggcatcagtctcgccgaagtaaaaagcgcgctggatgcttcaaaccaggaagcgggcggttcgtcgatcgaactggcggaagcggaatatatggtgcgcgccagcggctatctgcaaacgctcgacgactttaatcacatcgttttaaaagccagtgaaaatggcgtgcccgtttatctgcgtgatgttgcgaaggtccaggttggcccggagatgcgccggggcattgccgaactgaacggcgaaggcgaagtggcgggcggggtggtgatcctgcgttccggcaaaaacgcccgtgaagtgatcgccgccgtgaaggacaaactggaaacgctgaaaagcagtctgccggaaggcgtggagatagttacaacatacgatcgcagtcagctcattgaccgcgccattgacaacctcagcggcaagttgctggaagagtttattgtggtggcggtagtctgtgcgctgtttctctggcatgtgcgctcggcgctggtggcgattatttcgttgccgctggggttgtgtattgcttttattgtcatgcactttcagggactgaacgccaatattatgtcgttgggtggcattgcgattgccgtcggggcgatggtcgatgccgctatcgtcatgatcgagaatgcgcataaacggctggaagagtggcagcaccagcatcctgacgccacgctggataataaaacgcgctggcaggtgatcaccgatgcatctgttgaagtggggccggcgctgtttatcagtctgctgattatcacgctgtcgtttatcccgattttcaccctggaagggcaggaggggcgtctgtttggcccgctggcgttcaccaaaacctatgcgatggcgggcgcggcgctgctggcgatcgtagtgatcccgatcctgatgggctactggatccgtggcaaaattccgccagaaagcagtaacccgctcaatcgctttttgattcgtgtttatcatccgctgttgctgaaagtactgcactggccgaaaaccacgctgttggtggcagcgctttcggtgctgacggttctctggccgctcaataaagttggcggggaatttttaccgcagatcaatgaaggcgacttgttgtatatgccatcgacgctgccggggatttccgcagcggaggcggcgagtatgctgcaaaaaaccgacaagctgattatgagcgtacctgaagtggcgcgggtatttggcaaaaccgggaaagcggaaaccgccaccgattctgctccgctggaaatggtagaaacgaccattcagcttaagccgcaggatcagtggcggcctggcatgacgatggacaaaatcattgaggaactggataacaccgtgcgtctgccggggctggcgaatctgtgggtgccgccaattcgtaaccgtatcgatatgctctcgactggcattaaaagccctatcggcattaaagtttccggcactgtgctggcggatatcgacacgatggcggagcaaattgaagaagtggcgcgaacggtgccaggcgtggcttctgcgcttgctgagcgtctggaaggtgggcgctatatcaacgttgagattaaccgtgaaaaagccgcgcgttacggtatgacggtggcggatgtgcagttgtttgtgacttctgcggtgggcggggcgatggttggcgaaacggtggaagggattgctcgttatccaattaatctgcgttatccgcaaagctggcgcgatagcccgcaggcactgcgccagttgccgatcctcacgccgatgaagcagcaaatcactctggcggacgtggccgacgttaaagtctctaccggaccgtcgatgctgaaaaccgagaatgcgcgcccgacgagctggatttatatcgatgcccgcgatcgtgacatggtgtcggtggttcacgatctgcaaaaagcgatagctgaaaaagtgcagttaaaaccgggcaccagcgtggcattctccgggcagttcgagctactggagcgcgccaaccataagctgaaactgatggtgccgatgacgctgatgatcatcttcgtgctgttgtatctggcgttccgtcgggtgggcgaagcgttgctgattatcagcagcgtaccgtttgcgctggtgggcggcatctggttgctgtggtggatgggctttcatctttccgtggcgacgggcaccggttttattgcccttgccggggtcgccgccgaatttggcgtggtgatgctgatgtatttacgtcacgccatagaggccgagccgtcgttgaataatccgcaaacattcagcgagcagaagctggatgaggcgttatatcacggcgcggtactgcgcgtgcgcccgaaagcgatgacggtggcggtgattatcgctggtctgctgccgattctgtggggaacaggagcagggtcagaggtgatgagccggattgccgcgccgatgattggcggcatgatcaccgcgcctttgctgtcgctgtttattatcccggcggcgtataagctgatgtggctgcaccgacatcgggtacggaaataaaagcaggataccccgtttaaccgtgtggattgtgtcttgcgacgatgggcactaaatgttaaaaggtgcccctcaacaaaaaagacacacaggggaaaggcgtgaaaaacgcgtcaaccgtatcggaagatactgcgtcgaatcaagagccgacgcttcatcgcggattacataaccgtcatattcaactgattgcgctgggtggcgcaattggtactggtctgtttcttggcattggcccggcgattcagatggcgggtccggctgtattgctgggctacggcgtcgccgggatcatcgctttcctgattatgcgccagctcggcgagatggtggtcgaagagccggtatccggttcatttgcccactttgcctataaatactggggaccgtttgcgggcttcctctctggctggaactactgggtaatgttcgtgctggtgggaatggcagagctgaccgctgcgggcatctatatgcagtactggttcccggatgttccaacgtggatttgggctgccgccttctttattatcatcaacgccgttaacctggtgaacgtgcgcttatatggcgaaaccgagttctggtttgcgctgattaaagtgctggcgatcatcggtatgatcggctttggcctgtggctgctgttttctgggcacggcggtgagaaagccagtatcaataacctctggcgctacggcggtttctttgccaccggctggaatggattgattttgtcgctggcggtaattatgttctccttcggcggtctggagctgattgggattactgcggctgaagcgcgcgatccggaaaaaagcatccctaaagcagtgaatcaggtggtgtatcgcatcctgctgttttatatcggttcactggtggttttactggcgctctacccgtgggtggaagtgaaatccaacagtagcccgtttgtgatgattttccataatctcgacagcaacgtggtagcttctgcgctgaacttcgtcattctggtggcatcgctgtcggtgtataacagcggggtttactctaacagccgcatgctgtttggcctttctgtgcagggtaatgcgccaaagtttttgactcgcgtcagccgtcgcggcgtgccgattaactcgctgatgctttccggagcgatcacttcgctggtggtgttaatcaactatctgctgccgcaaaaagcgtttggtctgctgatggcgctggtggtagcaacgctgctgttgaactggattatgatctgcctggcgcatctgcgttttcgtgcagcgatgcgtcgtcaggggcgtgaaacacagtttaaggcgctgctctatccgttcggcaactatctttgcatcgccttcctcggcatgattttgctgctgatgtgcacgatggatgatatgcgcttgtcagcgattctgctgccggtgtggattgtgttcctgtttgtggcgtttaaaacattgcgtaggaaagtgaattaagctgatgtgaggctgatttgcccgatgcgcaagcttatcgggcctacaatttgtaacgattctgtaggtcggataaggcgttcacgccgcatccgacaaaatgatgtcaaccatccgaaaccgctctcatccattcgatgagagcggtttttttaattactgcttaaatgcacccgccagagagcgaatatcattgccggttggcgactgatgaagtcgcagaccaaactcttcgacaatcgcaaatatgtgatcgaatatatcagcctgaatgctttcatattccagccacaccacggtgttggtaaacgcatagatctcaagcggtaaaccgttatcaccaggagccagttggcgtaccattaaggtcatatctttgcgaatccgcggatgattccgcagatattcgttcagataggcacgaaaggttccaatattggtcattcggcgcaggtttaataccgactccgtagaaccttgctggcgattccactcattaatttcctgatggcggctggttaaataaggctttaacaaatgcgctttattcagacgttgcatttcgtcttcatcaagaaaacgaatactggtgacatcaatactgatactgcgcttaatacgtcgcccgccagatgctgacatcccgctccagtttttaaaggagtcagaaaccagagaccaggtgggaatagtggtaatggtattgtcccagttacgtactttgacggtggttaacccaatatcgatcaccgcgccatccgcgccgtatttcggcatctccagccagtcgcccagtttcagcatatcgttcgcggaaagctgaatacctgccaccagaccaagaatcggatctttaaataccaacatcagcacggcagccattgcaccaagaccgctgatcagaatcgctggcgactgaccaatcagcagcgagatcatcaaaatgccgaccagaatcgcgccgatcagtttaatcccctgaaaaatccctttcagcggtaactgagatgccgccgggaatttctgcgccagattcaaaatcacatccagcaacgagaagactgaaagcagcgcatacatcatgatccacaactgcgcgcaggtagtcagaatatctgccgcttcggtgcctttttgtagccagaataccgcctgaatattgacgataatcccctgcaaggtaaaagctaaacggtggaagagtttattctgggtaatgatttgcaaccaaagccgtgaactggcgatggcgcgtttttcgaaggtccgcagtaccacccagtgcaaaaaaatatgcaccacgacggcggtcagaaaaataataccgaaaatcatcaccatcgaggtggtgtgatcaatctcaatacccgctaaatcttcaacctgggatattaaatcctgcataacgtctcctttatacaacagcagcctatgatgacggctgaaacagggttatgcaaatcaggagaatctgaggggaaatagccgggcagatgcccggcaagggagaattacacttcggttaaggtaatgttctgcggcagacgagatttcggcagcgtagcgttaaaatcttcaacgctgtgatgacccaccggaacaaccaccagactggtgtagcctttctctttcagaccaaattcttcatcgaggatggcggcgtcaaaaccttcgatgggcaccgcgtccagacccagcgccgccacgcccagcaggaagttaccgacgttgagataaacctgttttgccatccactctgcatcatcatgcagatctttacggtgcatatcggcgaagaacttgcgacctttatcgttcgcggctttcgcttccggcgtggcaaagcggccatcggcatcttcctggtcaacaaccagcttcagccaggcatcgtccatcgcggtttttgcacagaacaccacgacgtgcgaggcatcaagcattttacgctcgttgaacacgtaattatcggcagcggatttggcaacacgcgctttaccttcttccgtgctggcaacaataaaatgccacggctgggagttggtgctggatgggctgtattgcagtagagttttgatctgctcggcctgttccggggtaagttttttgctggcatcaaatgccttagtggaatgacgctttaaggcgacagaaatgatatccataaagactccatgtgaaagtaattttgcgtgccagcagattacaaggatcgagatgaaatggtaagcgagaaaaatgcgctattgatttacggttgagtcaggacgcagtcgtttttgatcgcgtttagccagaccatcaaccaccagattccacgaatcgttgatcagatcgcgaagtaacgcttcggagatttcctcgccgggatacactgaaatccagtgctttttattcatgtgatacccaggcttgatgcttgggtatatttgctgatttagcagggatttttgtggatcggacttcagattgataaaggggacgccgcgcagctccgacgacagcataaaaatcttgccgccaattttaaaaacatcgaactccgggccaaaaggccagcaaagctcgacaaagggtaactcaagagccaggcgtttcgccgtttcgtgcagtgattgcttatccataaatgttcctttaggcgaaggagaataagcaaagtatgccgcgaagttcggcgataatcgacgtttaatccgccagcgagaaccagcgtcgccagataaagcgtagaacaaaatactcaatagcgcccagcactaaaaaccacagacaaaacaataaagtgtaaagctggctaagatccatcagatggaacgtggtcaccagtttttgtgccagcgttagccccagtgcgggggcgggcagcagcaggcaagagaggaaagccatcagcaaaatgcctgctgcggtggtcaaggtttctaaagggtgtttcataacattgttaaatgtaagttaaaacaccattgtcagggatattcttctgtaaggcaattcccgacttattctccggcccagatctcacaatgctttttcaccagcccaattagcgagccaccatcggcgacgaaatcacgcattagctgcgcttcattcagaccactgacgacctgacggtgcagtgcttcaattgcgctcgatgcgccaattttatgtgcagaaggggtgattttttccagtaaacgcaaggtggcttccgttagtgaccgacgatcgccagtatgcggatcggtaatgacgccttccagcccatagcgacaggcctggaaacggttgaatttatacagcaggtaatctttctcctgatgtttaaacgggcgttccgtcagtaaccagtgggcggtggcctgaattaatcccgccatatttaccgcgtggctaagggttaacggggtatccatcacccgaacttccaccgtaccaaaatgggggctggggcgaatatcccagtgcagatctttaatgctgtcgatcatcgtggtgtaactcaggcagcgaaacagggcttcaaattgttgccagttactgacccacggcatcgggccattatcaggaaaggcggaaaaaatattcggtcgtgaggaggcaaaacgcgtatccgttccttgcatatatggcgacgcggcggaaagggcgataaagtgcggcacaaaccgtgacaagccgtgcagcaaataaatggcgtcatcgccactggcgcagccaacatggacatgctgaccaaaaacggtcgcctgctggatgagatagccaaagttttgcagcgttcgttgatagcgttcgttatcgcacacctcctgacgctgccatttctgaaacggatgcgtgccaccgccgcaaatttccagatgatgatctgcggctgcctgcaatacgactttctgcatcgctgaaaattgcccggcagcctggttgatatcacggcaaacatccgtcgccagctccagcatactttcggtgatatcgtgctttacctctccggccgtgatcttatttttaaccgcgtcaatcagcattgaagagtcctggcttaagtcatagcccggcggattaaccacctgcatttccagttcaataccgagggtaaaaggttcagaaacatgaaaatcgggtaatggcataggtttctcttatgttggcgttttctattcagtatagaagtcggagcggctgggcgagatgcggaagttctggaatgtttcttttttgggtatggtgaactgattgctactgaagcaatttggctacttttgcaatgtgccaagttatggcagagctggctggctgcgaagaattttgacgattgcggcatgcagaaaaatacgggttcagcttcagttgatcaaatgaggagagagaagtccgaaacaggacttactgtataaataaacagctattttgctgaagaagggtaagataacggcgggtgcctgaagctttccggtttcaggtttactctgaggtctggaaggatgaagccccaggacgatatttctatcaaccctggggctacctacccaaacctgaacaatttggatggtagtcccttcttcgcatggaggcaatataaacatgctgacaaaatatgcccttgtggcagtcatagtgctgtgtttaacggtgctgggatttacgcttctggtcggagactcgctgtgtgagtttaccgtaaaggaacgtaatattgagtttaaggctgttctcgcttacgaaccgaagaagtagccgttgtgcggggagcaatccccgcatatccggttgtcaggtcagggtggtaaggcacctgctttacactttcgcccgcggtcagtgatggctgcgggcgaatcgtaccagatgttgtcaattaatcgtgttggcacagcgttatgactattttttcttttatctgccagtgcacagcaaacatctcattctcacgatgaattatgacctgttgtttattccggctaattatctgatagtccagaaaatctgcatcagtttggatttcacttgccttaaatgcgctctctttggcggaaaatgccagtgtcagcgccagaggaaaggctaaaccgcagtctgcaagtcgcttgtgttccgctggtgtaataatgttgtctgtcaattctcttgcggtttgtgcagagaaaatctcttcaatatcaatgccaatcggttgacgggaaaccacggctaatgccgtagtcccacagtgactaatgctgccgtatacccccgcaggccacacaggttggcgtagctcgccgattgcaggcacacatttatagccatattcccgcagcgcataaattgcagcgatccgcccggctaaatgctctgttttacgtttacgtccagcgtgttgaagttgtgcgtagtgcggcagccagagtaaatcctgctcgcgaaaactcgccggatcaaactcaacaaaatgcagcgtatgtcctgcaaaggggagggaggtatgcgtagttttcatgtcaaccatattagagaatgatgacaaacgcaaaactgcctgatgcgctacgcttatcaggcctacgtggtcctgcaatatattgaattggcaagatttttgtaggccggataaggcgttcacgccgcatccggcatgaactacgcgcactttgtcaacaatctgacgttagcttcagaagtgagtattaatgctcatataccacgtacgtcccggctcgttataggtatacgcaccggcaccggcgatatagttggcccctgccagatcgcccgtggtctgggcattacccgcacgccacaaacgtttgtcgaacaggttgtccacgccgccggtcagactgacattcttcgtcacatcccaggtcgcgctcaggccaacaatgctgtacggactgatttctttggtttccggtccaaccgctggctgacctttatagttgtacttcttcggctgctgtttgccgtaccaggtgaaggtcgtttgcatcgacaaatcttcccgtgcctgccagctcagcgttgagttcaacgtatactccgggatgatcgacaaacggtcgcccgtggttttgttttcactcttcagcatataagtgatgttattggtccacatcaccgtttcgctaaccggtacgtttaacgatccttccagaccttcaaccaccgctttcggtacgttatcccactgatagagatcggtgccgactgcgttttgccctacagccacatagcccgcttcaatcttattgcgataatcgttacggaaccaggtcacgcccgccagccaaccgtcgcgtttgaactccagaccaatctccttgttgatgctggtttctgctttcaggtcatcattaccttgcagatagcagccgcccgcgctggcatagcagccctgacctttactgtagagaatgtagtttgggttagtctggtacaggctcggcgctttataggcgcgggcgatgcccattttcagcgtgaagtcatcgcctaaaccttgcgatatgttcagcgccgggctccagttattgccgacaatactgtgatgatcgaaacgcagccccggcgttacgatggtgctgtcagtcagctccatattgttttcggcaaacagcgagaaaatttctgcttttgaatacgggctacggtcggtggcactcacaccatcaatagcaccgccggtattcgtcccggtcagcgcctgggtgttggaacttaagtccttcatccgttgctgattccactctgtacccagcgtcagcgtttggtttacgaggaaatcaatcggcaggttaacttcgctgtgcagcatcacgtcatcaagatcgatatctacaaaatcctgtgccgctttttcgttaaatttcccttcggtaccgcccgccagaccttccggaatacgcgagttacgggtgtgttcgtactgcacccagttgctggtggtcacgccgttatcccagccaccgttccaggtcagcgagtagttctggcgatacaggcggttggtttcatcgccatatttcgatcgagtgtaagcgtcagagttggtgttctgcgtatcacccgcatacaggttaccctggcggctgtagcccgcttccagttcgagtgactgcagaggcgcgaagtcccagcgcaccacgccattaatatctttgttgatcaccccttcgcgcccggctggtaacgtcgtggcatacgttccggcacgcgcggactgatggccctggttgatatcccacgcgtcagcctgggttttgtcgaggttgccatacaagcggaagctgaattcgtcgcccagcggaccggtcaggctgaagttggtgcgtttggtggcaccttcctctttatgttctggcgcattgaaataagcatcccaggagccgtgccactcaccgctgccttttttggtaatgatgttaaccacgccgcccgccgcgccgttgccataacgcgcagctgccggaccacgcagaacttcaatacgttcaatcatttcaggcggcacccaggaggtatcaccacgggtatcgcgctcgccacgccagccctgacgcacagagttacggctgcttaccggcttgccgtcaatcaaaatcagcgtgttttccggacccatgccgcgaatatcaatctggcggttattaccacgctgaccactggtggagttaccggtcaggttaacgccaggcatggtacgaatgatctccgatacatcgcgggcaaccgggtttttgcggatttcatctgcggtaatggtcgaaacgccaggcgcctgcaagttctgctcggcggcggtaacgacaatggtatcgtcatgtgaaacaggagtatcggtcggctcttgtgcctgtgctaccccataaatccccagattgaccaacaaggccagggaatgaatcttcttgttcattgttttattcctgcatttttgccacgaattgcaactgtcgggcatggtcgccatcaacacgacgcatcccgctaccgcgaaaacctttgatcctgaaagacacgcagtgcagctgattaattaatgtccgcgcttcccacggcgcgccattacgctattgcaaatgcaaatagttatcaataatattatcaatatatttctgcaatcaataaaaaattgcacagtaaacatggggttatggtgtgacggcgttaaaagtaggaagtgagagctggtggcagtcgaaacatggcccggaatggcaacgtctgaatgacgaaatgtttgaggtcactttctggtggcgtgatccccagggttctgaagaatactcgacgataaagcgcgtatgggtctatatcactggcgtgaccgatcaccatcagaacagccagccccggtcgatgcagcgaattgcaggaaccgatgtttggcagtggacgacacaactcaatgccaactggcgcggcagctactgctttattcctactgaacgcgatgacattttttctgcaccatcccccgatcgcctcgaattacgcgaaggctggcgaaaactattaccccaggcgatagccgatccgctgaatccacaaagctggaaaggcgggcgagggcacgctgtttctgcactcgaaatgccgcaagcgcctctgcaaccgggatgggattgtccgcaagcgccagaaacgcctgccaaagaaattatctggaaaagtgaacggttgaaaaattcacgccgtgtatggatttttaccaccggcgatgcaacagcagaagaacgcccgctggcagttttgcttgatggcgaattttgggcgcagagtatgcccgtctggcctgcgctgacttcgctgacccatcgtcggcaacttccgcccgccgtgtatgtgttgatcgacgctatcgacaccacgcaccgcgcccacgaactgccgtgtaatgcggatttctggctggcagtacagcaagagttattaccccaggtgaaagctattgccccttttagcgatcgcgccgatcgcaccgtggtcgccggacagagttttggtgggctttccgcgctgtatgccggactgcactggcctgaacgctttggctgtgtattaagccagtcaggttcgtactggtggccgcatcggggcgggcaccaagagggcatgttacttgaacagctaaatactggtgaagttagcgccgaaggtctgcgcattgtgctggaagcgggtgttcgcgagccgatgatcatgcaggccaatcaggcgctgtatgcgcaattacaccccctaaaagaatccattttctggcgtcaggttgacggcggacatgatgcgctttgttggcgcggtggcttgatgcaggggctaatcgacctctggcaaccacttttccatgacaggagttgaatatggcattcagtaatcccttcgatgatccacagggagcgttttacattttgcgcaatgcgcaggggcaattcagtctgtggccgcaacaatgcgccttaccggcaggctgggacgttgtgtgtcagccgcagtcacaggcgtcctgccagcagtggctggaagcccactggcgtactctgacaccggcgaatttcacccagttgcaggaggcacaatgagccagcatttacctttggtcgccgcacagcccggcatctggatggcagaaaaactgtcggatttaccctccgcctggagcgtggcgcattacgttgagttaaccggagaggttgatgcgccactactggcccgcgcggtggttgccggactagcgcaagcagatacgttgcggatgcgttttacggaagataacggcgaagtctggcagtgggtcgatgatgcgcagacgttcgaactgccagaaattatcgacctgcgaaccaacattgatccgcacggtactgcgcgggcattaatgcaggcggatttgcaacaagatctgcgcgtcgatagtggtaaaccactggtctttcatcaactgatacaggtggcggataaccgctggtactggtatcagcgttatcaccatttgctggtcgatggcttcagtttcccggccattacacgccagatcgccaacatttactgcgcattgctgcgtggcgaaccaacgcctgcttcgccgtttacgcctttcgctgatgtagtggaagagtatcagcagtaccgcgaaagtgaagcctggcagcgtgatgcggcattctgggcggaacagcgtcgtcaactaccaccgcccgcgtcactttctccggcacctttaccggggcgcagcgcttcggcagatattttgcgcctgaaactggaatttaccaacggggaattccgccagctggctacgcaactttcaggtgtgcagcgtaccgatttagcacttgcgttggcagccttgtggctggggcgattgtgcaaccgcatggactacgctgccggatttatctttatgcgtcgactgggctcggcggcgctgacggctaccggacccgtgctcaacgttttgccattgggtattcacattgcggcgcaagaaacgctgccgcaactggcaacccgactggcagctcaactgaaaaaaatgcgtcgccatcaacgttacgatgccgaacaaattgtccgtgacagcgggcgagcggcaggagaggaaccgctgttcggtccggtactcaatatcaaggtatttgattaccaactggatattcctggtgttcaggcgcaaacccataccctggcaaccggtccggttaatgaccttgaactggccctgttcccggatgaacacggtgatttgagtattgaaatcctcgccaataaacagcgttacgatgagccaacgttaattcaacacgctgaacgcctgaaaatgctgattgcgcagttcgctgcgaatccgtcgctgttgtgcggcgatgtcgatattatgctgccaggtgagtatgcgcagctggcgcagatcaacgccactcaggttgagattccagaaaccacgctgagcgcgctggtggcagaacaagcggcaaaaacaccggatgctccggcgctggcagatgcgcgttaccagttcagctatcgggaaatgcgcgagcaggtggtggcgctggcgaatctgctgcgtgagcgcggcgttaaaccgggcgacagcgtggcggtggctctaccgcgctcggtctttttgaccctggcgctacatgcgatagttgaagctggtgcggcctggttaccgttggataccggctatccggacgatcgcctgaaaatgatgctggaagatgcgcgtccgtcgctgttaatcaccaccgacgatcaactgccgcgctttagcgatatccccaatttaaccagcctttgctataacgccccgcttacaccgcagggcagtgcgccgctgcagctttcacaaccgcaccacacggcttatatcatcttcacctcaggttccaccggcagaccaaaaggggtaatggtcggtcagcaggctatcgttaaccgcctgctatggatgcaaaaccattacccgcttacaggcgaagatgttgttgcccaaaaaacgccgtgcagttttgatgtctcggtgtgggagtttttctggccgtttattgccggggcgaaactggtgatggctgaaccggaagcgcaccgcgacccgctcgctatgcagcatttttttgctgattatggcgtaacgaccacgcactttgtgccgtcgatgctggcggcatttgttgcatcgctgacgccgcaaaccgctcgccagagttgcgcgacgttgaaacaggttttctgtagtggtgaagccttaccggctgatttatgccgcgaatggcaacagttaaccggcgcgccgttgcataatctatatggcccgacggaagcggcggtagatgtcagttggtatccggcttttggcgaggaactggcagaggtgcgcggcagcagtgtgccgatcggttatccggtgtggaatacgggcctgcgcattctcgatgcgatgatgcatccggtgccgccgggtgtggcgggagatctctatctcaccggtattcaactggcgcaggggtatcttggacgacccgatctgaccgccagccgctttattgccgatccttttgccccaggtgaacggatgtaccgtaccggcgatgtggcccgctggctggataacggcgcggtggagtacctcgggcgcagtgacgatcagctaaaaattcgcgggcagcgtatcgaactgggcgaaattgatcgcgtgatgcaggcgctgccggatgtcgaacaagccgttacccacgcctgtgtgattaaccaggcggcagccactggtggtgatgcgcgtcagttggtgggctatctggtgtcgcaatcaggtctgccgttggataccagcgcattacaggcgcagcttcgagaaacattgccaccacatatggtaccggtggttctgctgcaacttccacagttaccacttagcgccaacggcaagctggatcgcaaagccttaccgttgcctgaactgaaggcacaaacgccggggcgtgtgccgaaagcgggcagtgaaacgattatcgccgcggcattctcgtcgttgctgggttgtgacgtgcaggatgccgatgctgatttctttgcgcttggcggtcattcgctactggcaatgaaactggcagcgcagttaagtcgacagtttgctcgtcaggtgacgccggggcaggtgatggtcgcgtcaactgtcgccaaactggcaacgattattgatggtgaagaagacagcacccagcgcatgggattcgaaaccattctgccgttgcgtgaaggtaatggcccgacgctgttttgtttccatccggcatccggttttgcctggcagttcagcgtgctctcgcgttatctcgatccacaatggtcgattatcggcattcagtcgccgcgccctcatggccccatgcagacggcggcaaacctggatgaagtctgcgaagcgcatctggcaaccttacttgaacaacaaccgcacggcccatattacctgctgggttattcacttggcggtacgctggcgcagggcattgcggcgcgactgcgtgcccgtggcgaacaggtggcatttcttggcttgctggatacctggccgccagaaacgcaaaactggcaggaaaaagaagccaatggtctggatccggaagtgctggcggagattaaccgcgagcgcgaagccttcctggcggcacagcagggaagtacctcaacggagttgtttaccaccattgaaggcaactacgctgatgctgtgcgcctgctgacgacagctcatagcgtaccgtttgatggtaaagcgacgctatttgttgccgaacgcacgcttcaggaaggtatgactcctgaacaggcctgggcaccgtggattgctgagctggatatctatcgtcaggattgtgcgcatgtggatattatttccccggagtattttaaagaaataggaccactaataaatacacaaattaataactaaccgtacgttagtaaagaacttgccataacctcatgtaaaaccataatccgactaaatgattatggtttttttattcttaaaatttatttatttttctgagagcagcgtcattgctggggttgctaagtttgttattcattttgagaataataatagtgaaagagtgctttcggataaatctcagttcctgttagaatgctatgtacatcgttgtgctttacggactaaaacctcaggtttcactacatgtcatcactgaatattaaacagggaagtgaagctcattttcccgagtatcctctggcgtcgcccagtaataatgaaattgatttacttaatctaatcgaggttttatggcgggcaaaaaaaacggtcatggcggtcgtttttgcgtttgcctgcgcaggcttgctgatctctttcatcctgccgcaaaaatggactagcgcggcggttgtcacgcctccagaacctgttcagtggcaagagctggagaaaacattcactaagcttcgtgtgctggatctggatatcaaaattgatcgtacagaagcatttaacctgtttatcaagaaatttcagtctgttagcttgcttgaggagtacctgcgttcatcaccttatgtgatggatcaattaaaagaagcgaaaatcgacccactggatctgcatcgcgccattgttgcattgagcgaaaaaatgaaagcggttgatgacaatgccagtaagaaaaaagatgagtctgcattgtatacttcctggacgctaagtttcaccgcacccaccagtgaagaggcacagaaagtgttggccgggtatatcgattatatctctgcgttggtggtgaaagagtcgatagaaaacgtccgtaataaactggagatcaaaacccagtttgaaaaagaaaaactggctcaggatcgcattaaaacgaaaaatcaacttgatgcaaacattcagcgcctcaattattcacttgacattgccaacgcggcaggaattaaaaagcccgtatacagtaatggtcaggccgttaaagatgaccccgatttctctatttctctcggtgcagacggtattgaacgcaaactggaaattgaaaaagcagtcactgacgttgcggaattgaacggtgaattacgtaatcgtcagtatctagtcgagcaattaacaaaaacaaatatcaacgatgtgaattttacaccgtttaaatatcagttgcgtccgtcattacccgtaaaaaaagacggtcagggtaaggcgattattgtgatcctttctgcgttggtcggcgggatggtggcttgtggtggtgtgttgttgcgtcatgcgatggcatccagaaaacaggatgccatgatggcagaccacttagtttaaatctttgcggttgaaggtgccgttcgtccgagcggcaccacgagcggcgttccggcaaccggatcgtcaataatcatgcagcgcagaccataaatgcgctcgatcagttcagcagtgacaatctccttcggtgctccctgagcaacaattttcccttcccgcaatgcaatcaaatggctggcgtaacgacaggcctgattaagatcgtgcagcaccgccgccagggtatagcctttctcgcggttcagttcgcttaacagttccagcaaatcaatctgatgactgatatccagccaggtcgtgggttcatcgagcagcataattgccgtttcctgggccagcaccatcgcgatccacgctcgctggcgttgtccgccagaaagggtgtccacgctttgatccgccagatgagttattcccgtggcctgcatcgcttttgttaccgcgtcttcatcttctttgcgccagcgggtaaacagcggttgatgcgggtaacgcccacgcgccaccagctcctgcacggtgatatcgcccggtgtggtagcattttgcgccaacagaccaatccggcgtgcaacctctttactggcgtaatgttgaatgtgctcgccatccagccagacatgcccgtgagcaggcgtcatcaggcggcttaaggtacgcagtaacgtggatttaccgcagccatttggcccgataattgccgtgaagtgaccatcaggtatttctacagtcagattttccgcaacggtatatttgccatatccgagggttaactgttcgccgcgcaaacgggctactgattcggtcattttttgcgagactcctgaattaacaagacgataaggtaaataccgccgaggctgacggtaacgacgccaaccggaagttgatacggcataaacagttgttgggcgcagagatcggccaccagcagtaacaacgccccgcacagcgccgcctgggtcagcccccagcgagcggtgccactgatgcggcgggcaatgtgtggcgcgactaaagcaataaaggaaattggccccgccagggcagtggcagctgcggtaagcactacggcgaccagcatcattaacagtcgcgaacgttcgacgctgacgcccagcgcacatgcggtatcatcgcccatttccagcaagcgcattcgccgcaccagcaaggcggcggcaattaacattaatataatgatgggtgcggaaggcgaggtttttgcccacgtcaggccattgagcgatccggcattccacaaacccgctgttagcgccgtttctaaagacgctttcagcaacagccaggtattaaaggccaccagcatggcgcgaacaccgataccgataataatcaaccgaaaggtgtcgataccgttacgccaggcgagcagccagaccaacagcgaagtgacaatgccgcccaccattgctgccagcgcgatagccgtcaggtcctgaccaaacagcaccatcgccaccagcacgccgctccacgccccggtgttaaagcccattacgtcagggctgccgagcgggttacgcatcagcgactgaaaaatcgcgccgctgacgcccagcgccgcgccaatcaacagcgccatcagcacgcgtggtaaacgccattcggtgaccaccatcgtcatactgcgcggcgtgtcgcccatcaacgcggcgaatacctgcgaagtttccagcgtgacggcaccgctacgtaatccccacacgcctgccatcacacaagctattagcaacagcagacaggtgataattaatcggcgagagacgtaaatcatgcgccacctcgcgttttacgtcgtacgaggaagatcagcactggtgcgccaataaaggcactgactacagaaacgcgcagttcgccgggaacaatcacccgcccaatgatatcggcaaacagcagcagggcaggggtagcgagtagcgtgacgggcagcgaccagcgatgatcggcacctaccagccagcgcgccatgtgcggcatcatcaggccaataaaggcaatcgggccaactaccgccgtcgcactaccacaaagcacggtaattgccagcagaccaatcaactgtgtgcgcgctacgcgactgcccagtgccgtcgcggtgtcactgccaaggcttaaactgttcagcgcgcggctcagtaatagcgcagttgctccagcggtaagcaccgggatcagcaccacttttaaggtatgtagattgcgaatatccagcgaaccggcttgccagaaacgcagttgatcgtagacgtcaggattaagcagggcgatgccgctggtcagcccttccagcaccgccgccagcgccacgcccgccagggttaaacgcaccggacttaactgcccgccgccctggctgccggtaaaggcaacaatcaacgaggccaccagcgccccggcgaaggccatcgccagttgttcctgtgcggaagagtaaccaaacagcgccgcacccagcacaatggcaaaactggcaccggcgttcacgccaagcaaaccaggatcggcaagtgggtttcgggtgagggtttgcattaacgccccggcaaggccaagcgcaccgcctgccagtaaaccggcaagggtgcgcggcagtcgtgcgtcgagcacgatggtgcagtcggcgctctggcaggtgccggagaaggcctccagcactacggaagcggggagtgattttgccccaatgagcaggcttaatgccgtcgcgataatcagtaataacagcaatccgggcacggcaatggcgcgtgtcacggcaacagaaccagacatacgaacttccatgataatgaaattaattatcgttatcgatcttatttggatatgttagcatgtgcagcctaagaataggtatttaaaatatttgatggcaaggcattgtaatgaataaacaatcctggctgcttaacctcagcctgttgaaaacgcacccggcgtttcgcgcagtattcctcgctcgttttatctcaattgtttctctgggtttgctcggcgtcgcggtgccggtgcagatccagatgatgacgcattccacctggcaggtggggctttcggtgacgctgaccggcggcgcgatgtttgttggcctgatggtcggcggtgtgctggcggatcgctatgagcgtaaaaaagtgattttgctggcgcgcggcacctgtggcattggcttcattggactgtgcctgaacgcgctgctgccggagccgtcattgctggcaatctatttacttggtttatgggatggttttttcgcatcacttggcgttacggcgctactggcggcgacacctgcactggtagggcgtgaaaacttaatgcaggccggggcgatcaccatgttgaccgtgcgcctggggtcggtgatttcgcccatgattggcggtttactgctggcgactggcggtgtggcctggaactacgggctggcggcggcgggcacgtttattaccttgctaccgttgttaagccttccggcgttaccaccaccaccgcagccgcgtgagcatccgttgaaatcattactggcaggatttcgttttctactcgccagcccgctggtgggagggattgcgttgctggggggtttattgacgatggcgagcgcggtgcgggtactgtatccggcgctggctgacaactggcagatgtcggcggcgcaaattggctttctctatgcggcaatcccgctcggtgcggctattggcgcgttaaccagtggaaaactggcgcatagcgtacggccaggtctgttgatgttgctctccacattgggggcgttcctcgccattggtctgtttggcctgatgccgatgtggattttaggcgtggtttgtctggcactgttcggctggctgagtgcggttagttcgttgctgcaatatacaatgctgcaaacgcaaaccccggaagcgatgttagggcggattaacggtttgtggacggcgcaaaacgtgacgggcgatgccataggcgcggcgctgctgggcggtttgggagcgatgatgacaccggttgcttccgcaagcgcgagcggttttggtttgttgattatcggcgtgttgttgttgctggtgctggtggagttgcgacgttttcgccagacgccgccgcaggtgacagcgtccgacagttaatgcttaaaacagcgccttaagtctatccagcacttgcatggcgctgtagtaatccagacggaacgtctcggttcccagcgcataaacctgcttgttttgtactgcaggcaggtgcgcgagcagcggattagcataaatagcatcggcgtctttctgatcaccggcgaacaggaatagtgactcgccatttaaccctgcagccagattttctccaccaagctgaatgatgtcatggcgtttgccctggctttggctggcgtttaaccctgcgggcaacttcgccagcgtaaagccgagttgttccagcatctgcccttgtgctgattccggcgtccagagattggcactgtgtgcagcggcggtatagacgatggcagtgaccggctgcggcggtaatttgatttgctctttcgccgccgccagttgcttatcaaactgtgcaatccgctctgccgcttgtttctcatgcccggtaatttcgccaagctgcgttaacagcgactgccagcttttgtcgtcgtaattgatgattaatgttggggcgatggtagaaagctgatcgtacagcgccagcgccgaatcgccgccggttgcgctaattaaaatcagatccggcatttgcgcggcaacggcttctgcactcggttcgccgatatagagccgttgcagtttgcgttctttcgccaccttgctccactggcgtaaaaagccctggtcatccgcgacgcggttatttggcgtggtcgcgccgctggcgatcaccggagcatcaatcgccagcagtgagccggtcagggtgacgctggtggaaactatacgctgcggctggctttccagggtatgagtgccacggctgtcagtaatctgacgcggccagtcggcggcctgaactgcggctattcctgaaagcaaaagtcctgttaatagaagggcgttgcggtagagcggggcgagtctcacaagtcagcttcctgttattaatgaagttaatgcttctcattttcattgtaaccacaaccagatgcaaccccgagttgcagattgcgttacctcaagagttgacatagtgcgcgtttgcttttaggttagcgaccgaaaatataaatgataatcattattaaagcctttatcattttgtggaggatgatatggatacgtcactggctgaggaagtacagcagaccatggcaacacttgcgcccaatcgctttttctttatgtcgccgtaccgcagttttacgacgtcaggatgtttcgcccgcttcgatgaaccggctgtgaacggggattcgcccgacagtcccttccagcaaaaactcgccgcgttgtttgccgatgccaaagcgcagggcatcaaaaatccggtgatggtcggggcgattcccttcgatccacgtcagccttcgtcgctgtatatacctgaatcctggcagtcgttctcccgtcaggaaaaacaagcttccgcacgccgtttcacccgcagccagtcgctgaacgtggtggaacgtcaggccattccggaacaaaccacgtttgaacagatggttgcccgtgctgccgcacttaccgccacgccgcaggtcgacaaagtggtgttgtcacggttgattgatatcactactgacgccgccattgatagtggcgtattgctggaacggttgattgcgcaaaacccggttagttacaacttccatgttccgttggctgatggtggcgttctgctgggggccagcccggaactgctgctacgtaaagacggcgagcgttttagctccattccgttagccggttccgcgcgtcgtcagccggatgaagtgctcgatcgcgaagcgggtaatcgtctgctggcgtcagaaaaagatcgccatgaacatgaactggtgactcaggcgatgaaagaggtactgcgcaaacgcagtagtgagttacacgttacctcctctccacaattgattaccacgccgacgctgtggcatctcgcaactccctttgaaggtaaagcgaattcgcaagaaaacgcactgactttggcttgtctgctgcatccgacccccgcgctgagcggtttcccgcatcaggccgcgactcaggttattgctgaactggagccgttcgaccgcgaactgtttggcggcattgtgggttggtgtgacagcgaaggtaacggtgaatgggtggtgaccatccgctgcgcgaagctgcgggaaaatcaggtgcgtctgtttgccggagcggggattgtgcctgcgtcctcaccgttgggtgagtggcgcgaaacaggcgtcaaactttctaccatgttgaacgtttttggattgcattaaggagcgaggatgagcattccattcacccgctggccggaagagtttgcccgtcgctatcgggaaaaaggctactggcaggatttgccgctgaccgacattctgacccgtcatgccgcaagcgacagcatcgcggtcatcgacggcgagcggcagttgagttaccgggagctgaatcaggcggcggataacctcgcctgtagtttgcgccgtcagggcattaaacctggtgaaaccgcgctggtacaactgggtaacgtcgctgaactttacattacctttttcgcgctgctgaaactgggcgttgcgccggtgctggcgctgttcagccatcagcgtagtgaactgaacgcctatgccagccagattgaaccggcgttactgattgccgatcgccaacatgcgctatttagcggggatgatttcctcaacacatttgttgcagagcattcttcgattcgcgtggtgcagctgctcaacgacagcggtgagcataacttgcaggatgcgattaaccatccggctgaggattttactgccacgccatctcctgctgatgaagtggcctatttccagctttccggcggcaccaccggcactccgaaactgatcccgcgcactcataacgactactactacagcgtgcgtcgtagcgtcgagatttgtcagttcacacaacagacgcgctacctgtgcgcgatcccggcggctcataactacgccatgagttcaccgggatcgttgggggtatttctcgctggcggcactgtcgttctggctgccgaccccagcgccacgttttgcttcccattgattgaaaaacatcaggtgaacgtcaccgcgctggtgccgccagcagtcagcctgtggttgcaggcactggctggaggcgaaagccgggcgcagcttgcctcgctgaaactgttacaggtcggcggcgcccgtctttctgccacccttgcggcgcgtattcccgctgagattggctgtcagttgcagcaggtgtttggcatggcggaagggctggtgaactacacccgtcttgatgatagtgcggagaaaattatccatacccagggttacccaatgtgcccggacgatgaagtatgggttgccgatgccgaaggaaatccactgccgcaaggggaagttggacgcctgatgacgcgcgggccgtacaccttccgtggctattacaaaagcccgcagcacaatgccagcgcctttgatgctaacggtttttactgttccggcgatctgatctctattgatccagagggttacatcactgtgcaggggcgcgagaaagatcagatcaaccgtggcggcgagaagatcgctgccgaagagatcgaaaacctgctgctgcgccatccggcggtgatctacgccgcactggtgagcatggaagatgagctgatgggcgaaaaaagctgtgcttatctggtggtaaaagagccgctgcgcgcggtgcaggtgcgtcgtttcctgcgtgaacagggtattgccgaatttaaattaccggatcgcgtggagtgtgtagattcacttccgctgacggcggtcgggaaagtcgataaaaaacaattacgtcagtggctggcgtcacgcacatcagcctgaaggagagaacacgatggctattccaaaattacaggcttacgcactgccggagtctcacgatattccgcagaataaagtcgactgggcctttgaaccgcaacgtgccgcgttgttaatccatgatatgcaggactattttgtcagcttctggggtgagaactgcccgatgatggagcaggtgatcgcgaatattgcggcactacgcgactactgcaaacagcacaatatcccggtttattacaccgcccagccgaaagagcagagcgatgaagatcgggcgctgttgaatgatatgtgggggcctggcctgacccgttcgccggaacagcaaaaggtggtggatcgcctgacgccagatgccgacgacacggtgctggtgaaatggcgctacagcgcgtttcatcgttccccgctggagcaaatgctcaaagagagtggacgtaaccagctgattattaccggggtatatgcccacattggctgtatgaccaccgcaacggacgcatttatgcgcgatattaaaccgtttatggtggcggatgcgctggccgatttcagccgtgacgagcatttgatgtcgctgaaatatgtggccggacgttctggtcgggtggtgatgaccgaagaattgctgccagcacctatccccgccagcaaagcggagctgcgtgaggtgatcctgccgttgctggacgagtccgatgaacccttcgatgacgacaacctgatcgactacggtctggattcggtgcgcatgatggcgctggcggcgcgctggcgcaaagtgcatggtgatatcgactttgtcatgctggcgaaaaacccgaccatcgacgcctggtggaagctactctcccgcgaggtgaaataatggatttcagcggtaaaaatgtctgggtaactggcgcggggaaaggtatcggctatgccacggcgatggcatttgttgaggcgggggcgaaagttacaggttttgatcaagcgtttactcaggagcaatatccttttgcgaccgaagtaatggatgttgccgatgctgcgcaggtggcgcaggtatgtcagcgactgttagctgaaacggagcgactggacgtgctggtcaatgcggcgggaattttgcgcatgggtgcgaccgatcagctcagtaaagaggactggcagcagacttttgcggtcaacgtcggcggtgcgtttaacctgtttcagcagaccatgaaccagtttcgccatcagcggggcggggcgattgttactgttgcgtccgacgccgcacacacgccgcgcattggcatgagtgcttatggcgcatcgaaagcggcgctgaaaagcctggcgttgagcgtcgggctggaactggcgggtagcggcgtgcgctgtaatgtggtttcgccgggctccaccgacactgatatgcaacgcacgctgtgggtgagcgatgacgccgaagagcagcgtattcgcggctttggcgagcagtttaaactcggcattccgctagggaaaatcgcccgtccgcaggagatcgccaacacgattttgttcctcgcctctgacctcgccagccatattaccctacaggatattgtggtcgatggcggctcaacgctgggggcataagcatgatctggaaacgccatttaacgctcgacgagctgaacgccaccagcgataacacaatggtggcgcatctgggaattgtgtatacccgtctgggcgatgatgtactcgaagccgaaatgccggttgatacccgtactcatcagccgtttggcctgctgcatggcggcgcgtcggcggcgctggcggaaacgctgggatcgatggccggatttatgatgacccgcgacggacagtgtgtggtgggcacggaacttaacgccacacatcatcgcccggtgtctgagggaaaggtgcgcggtgtctgccagccgctgcatcttggacgacaaaatcagagctgggaaatcgtcgttttcgatgaacaggggcggcgttgctgcacctgtcggctgggcacagcggttttgggatgaacccgacagaataaaatgagattgcaggaaaattcggttaacggagtgatcgagttaacattgttaagttaaatattggtttcaactccgatttgcatggttgctgtgttgttaaattgtacaaagatgttatagaaacaaaatgtaacatctctatggacacgcacacggataacaactatgaacaaatcagggaaatacctcgtctggacagtgctctctgtaatgggagcatttgctctgggatacattgctttaaatcgtggggaacagatcaacgcgctgtggattgtggtggcgtcggtctgtatctatctgatcgcttaccgtttttatgggctgtatatcgccaaaaatgtgctggcggttgacccgacgcgtatgacgccagcggtgcgccataacgacgggctggactatgtgccgacggacaaaaaagtgctgttcggtcaccattttgcggccattgccggagcaggtccgttggttgggccggtactggcggcgcaaatgggttacctgccagggatgatctggctgctcgcaggggtggttctcgccggtgcggtgcaggatttcatggtgctgtttgtttccacgcgccgtgacggtcgctcgctgggtgagctggtcaaagaagagatggggccaaccgccggggtgatagcgctggtggcctgctttatgatcatggtcattatccttgccgtgctggcgatgatcgtggttaaagccctgactcatagcccgtggggaacgtataccgttgcgttcaccattccgctggcgctgtttatggggatctacctgcgctatttgcgtccggggcgtattggcgaagtgtcggtgattggtctggtgttccttattttcgccattatctctggcggctgggtggcagaaagcccgacgtgggcaccgtactttgactttaccggcgtgcagctgacctggatgctggtgggttacggttttgtggcggcggtgctgccggtgtggttgctgctggctccgcgtgactacctctcaaccttcctgaaaatcgggactatcgtcggtctggcggtgggcattttgattatgcgcccgacgctgaccatgcctgcgctaactaaatttgtcgatggcactggcccggtatggaccggtaacctgttcccgttcctgtttatcaccatcgcctgtggcgcggtgtctggcttccatgcactgatctcttccggcactacaccgaagatgctggcgaacgaagggcaggcgtgctttatcggctacggtgggatgttgatggaatccttcgtggcgattatggcgctggtttccgcctgtatcatcgatccgggtgtgtacttcgccatgaacagcccgatggcggtgctggctccggcagggacggcggatgtggttgcttctgccgcgcaggtggtgagtagctggggctttgcgattaccccggatacgctaaaccagattgccagcgaagtgggtgaacagtcgatcatttcccgtgcgggcggagcgccgaccctggcggtggggatggcctacattctgcacggtgcgctgggcggcatgatggatgtggcgttctggtatcacttcgccattctgtttgaagcactgtttattctgacggcggtggatgcgggtacgcgtgctgcgcgctttatgttgcaggatctgctgggcgtggtgtctccgggcctgaaacggaccgattcactgcctgctaacctgctggcaacggcgctgtgcgtgctggcgtggggctacttcctgcatcagggcgtggtcgatccgctgggcggtattaacactctgtggccgctgtttggtattgccaaccagatgctggcagggatggcgctgatgctctgtgccgtggtgctgttcaaaatgaaacgtcaacgttatgcctgggtggcactggtaccaacggcctggctgctgatttgtaccctgaccgcaggctggcagaaagcgtttagcccggatgcgaaagtcggcttcctggccattgctaataagttccaggcaatgatcgacagcggcaatattccgtcgcagtatactgagtcacagctggcgcaactggtgttcaacaaccgtctggatgccgggttaaccatcttctttatggtggtcgtggtggttctggcactgttctcgattaagacggcactggcggcattgaaagagccgaagccaacggcgaaagaaacgccgtatgagccgatgccggaaaatgtcgaggagatcgtggcgcaggcgaaaggcgcgcactaaagtcagagtgagggggaatgtgctgagcgttccccttactctcagcccgagcgtgttgatagcagttaagccctcttaattcaggagggcatttgtattactggaggtttagatgtttgattcactggcaaaagccggaaaatatttaggtcaggcggcgaaactgatgattggtatgcctgattacgacaactatgtcgaacatatgcgggttaaccatcccgatcaaacgccgatgacctacgaagagtttttccgtgagcggcaggacgcgcgctacggtggaaaaggcggcgcgcgctgctgctaaatatgtacgtcaggctttaaacgattccactttttcgaacgctgcacgcaacgtatctggtgtcagcgtgaccggcaggtaatgaatggattccaccggacgcaaggtgtgggcaatcactttgtcgatctccgcctgattattgatatccacttccagctccgccagcgtagtcggcagatgaaaacgctgatacgctccagttaattgcgccagcacatcatcctgacccagcaaggcgctttgcaccagaattccgtaggcgactttggtgccgtggagaaacttctcggtttgcggcagcacggtcagaccgttatgcacggcatgagctgccgccacacgcgtaaaacgatcgcccagaccaccaaccatcccaccaccagcaataatggcatccaccacatcgcaaaatgattgcgttaactggtgattttgctgatcgctcagcgcctgttcgctactgtttaacaagacgtcgcgaatagcctgcgcattattgatccctagccgcacggttagcggcaacgtttctggttgcggggccagcaccaccgcttcataccatttcgccagcgtgtcaccgatccccgccagcagatattgttgcggcgcgttgaggataatctccggttccaccagcaccataaaattggcgtcgtcgaaaatctcataatgcagcgcttgtccggcatcgttataccagacagagagcggtgtccaggcggcgcaggtagcggcgatcgtcggaacggtaacaaacggcagaccgagacggcgggcgagggctttcgcggtgtcgagtagtgcgccgccgccgacgccaatcaccacgctgcgatcgtcaccggactccgccgccagttgttgcacatcgctttcgctgcaatgaccacgaaacaaaatatgctttacccctggcagttcaaacgcaggcggcagtttggtttgtgccgcagcaatggcgcgttcgccgtagatccacaccgcgcgagaaagttgttcatcagtgaaaaaatcgtgcaggtgattgaaacttccgggatgtgaaaagtagttagccgggccgacgaccacgcggataggattgtgaggcatgttgtgttgtccttattgttttatttagacatctaaacgtcttgattgccaaatactagcatcgtgttatagtgccttcaacacgcaacttcgtcaggtacaataaaaatgacaaataaccctctgattccacaaagcaaacttccacaacttggcaccactattttcacccggatgagcgcgctggcgcagcaacaccaggcgattaacctttcgcaaggctttcctgattttgatggtccgcgctatttacaggagcggctggcgtaccacgttgcccagggggcaaaccaatacgcgcccatgaccggcgtgcaggccttgcgcgaggcgattgctcagaaaacggaacgtctgtatggctatcaaccggatgtcgacagcaatatcaccgtgacggcaggggcgacggaggcgttatacgcggcgataaccgcattggtgcgcaatggcgacgaagtgatttgttttgatcccagctatgacagttacgcccccgccatcgcactttcggggggaatagtgaaacgtattgcactgcaaccgccgcattttcgcgttgactggcaggaatttgccgcattgttaagcgagcgcacccgactggtgatcctcaacaccccgcataaccccagtgcaactgtctggcagcagactgatttcgccgctctgtggcaggcgatcgccgggcacgagatttttgtcattagcgatgaagtctacgagcacatcaatttttcacaacagggccatgccagcgtgctggcgcatccgcaattgcgtgagcgagcggtggcggtgtcatcgtttggcaagacctatcatatgaccggctggaaagtgggttattgcgttgcgcctgcgcccatcagcgccgagatccgcaaagtgcatcagtatctgaccttttcggtgaataccccggcacagttggcgcttgccgatatgctacgtgcagaacctgagcattatcttgcgttaccggacttttatcgccagaagcgcgatattctggtgaatgccttaaatgaaagtcggctggagattttaccgtgcgaaggtacatactttttgctggtggattacagcgccgtatctacgctggatgatgttgagttttgccagtggctgacgcgggagcacggcgtagcggcgattccgctgtcggtgttttgcgccgatcccttcccacataaactgattcgtctctgttttgccaagaaggaatcgacgttgctggcagcagcagaacgcctgcgccagctgtagttatttaaccgtccaggcgcgggaaaattgacggtcggcaaacaactcttgcaggccgttaatttgcttcaggcgcaacacttcgtcgctgtccattcccagctctttgccaattttattatcgtcccatcccaactggctgagttctcggacgatttctgacatggcagtgatttggtgacgtccacgagcgcgattatgacgaatagtcgcggcgatgcgttgattacgcgtaccttccagacaggtcaccggcaaataaccttttaagcgtaattttaacgatgatgagcctttaccaatttcatggcggtgaaaaccatccacgatttccagagcatttttatccgtatgcgtgactacaatgggttgggtaaaaccatctatttcaatggattttttcagcagttttttttcgggtggtgccacgttgtttgggttgtaatcattaggcataagttggctgtttttaacccacagaacgcaatccactggctcttcacgaaaggggctaacctgatggatcgccatgcggatttcattaatcgctttgatgcgatcatcttccggcaagctggcgagaaattgggttaaatcctgcgttaatcgttgttgcatagtatcccccattcctgacgttttccttttatccgttcgttataacgctgatagttcttcgctttcgtaggactaaatgataatgcccggcaccagtaatcgttattgagtaaaactttgcatattcgccgccaggaggggatatctttcgcgccaatgtccccgtgctgggtctgtggcacctcgacaccttttttctgataccaatgcaagtaaatggcaattttgttgcggtaatgctcagcggttttctccggcatgctatcaagcagcaataatgcatactcttgccagtctaaatgctctggtttgaggattttccgatgaccataaaaatgattgtcatgtccggcgtaaatgccgccactttttaccccgctgactcgtgcgcacatagcagcccagcgatccggttcgataacgtgatagagccataatccttgtcgttgctccgggccaaaaggttcgcaaattcgcatatgacgcagagggacgcctgcctgatacattatattatacagtgggttacagagctgttgatggttagcataccaggtccagatatcagccactttccagtcgtagatggggtaaatgtaccagctatgaccgcctggtgcggcagtagtccagggcttatcatcggcaaaacgttgtttatttaaactggcgatggcgacaaaacggttgaaggactcatctgcacggatgccgatcatcatcgccgccggacgtttttgtgaaaaccattcagcaaactcacgcacaaattgttcgaaggtcatgccaggctggtaaaaggagaaaaagtcaggatcggttatcgcatcttgcgggggctgacgcacccattcgacatcaggttcccagcactgccattcgggttggtattgagaaagggaattttgcgtcgtaagcgggagcgcaacccagtaaaactcttcgatgacatcggcgtaaaactcacgtaatgactgaacatagttaatagtgcatgagaactgcgcttcccagtcgataaacaaaacgcagatttttttgcccatttgtcgggcaatttcggctgtcagatgcagcattaatccggaatctttaccacccgaaaaagaaacacagatacggggtagggtattaagtgtccaggtaatacgttcttttgcagcttccagaatattcagtggaagcgggattttataaatagacatctaaaaacgctctctgaacgttacggggtgattcgtgagatgaatccgctaattataggataaacgaagcaagatagagcacattattttatattcacacaatgaattaattgatgcgtaatatattatttgtcagtggtaatgaatcagaagctatcatttaaacgatctatgaatcgggagaagacaaggttgttcaacgaagccttgttataggatatataaagtttaaccgcaggaagaggttgttccagttttatttcttttaacttcaaaaagtcacgatgtaaatcgtacagttcggtgggcacaatgcctaataagtcagtaacagaaatactattaattatagtcatcaaagaagaactgcgaaatgaaactttacggttcataaaacgttcatctatgtccatttgaatttcgtcaatccctgctgatttagatatcaacagggtgaattcttcggcgataatttgttcatagttactggtatcagtaatacgaggatgtttgttgctacatataagggaattgcgaatagtgtgtaacggcatgcagatgacagagcgactaattactggttgcagcgtaattgccaggtcagttttgcgttgaaccaacagttcttcggcattttcagctgaaagcagtatgtcatggcattctatatcgattgaagtatcttgtctaagacagcggattagcatgttgttattagtacaagaaataagctgaggaccgtagataataaaatttttctttagttcagacttattaacgatattgatcgtttgttcaaggcctctgagatttttctcaagatggtgatgcaggtttaaccctgttgtagtcggcgcgatacctttccctgagcgaatgaataacgggtcattaaattgcgcacgtaaacgttgtaacgactgactaacagcagagggcgttatatataatgattctgccgctttactaatgctgagatgttgataaatacattcaaatatgaccagtaaattgaggtcaaatttttttagatcataaagattagccataacatactccgttgtattgtctcttccataaatcattcacttgttcaataatgttgttgtatttatatgtattatgtttttctgcttaactttggattaagattttctaaaatagcatagctgtcaggtgggttacgagcaattcatgcgtttttaggatggttgaaaagcagagagagatttcaaccatcgatgaattatattctatttattccccataatgatattaagtgttttctgatcgggtaatccgacggcttgttgcagggtattttccttactcatgtaatagatagctggtgtgacatttgcccccagatcgtccatgagtttctcgttgtcgcttaacactttcatttgctctgtgcttacgtttgcaggcacgcttagcttaagcttgccaccagaggcttcatattgttgccaggtttttgcgggatctttggaggcaagaattgccgctgctgtcgccgggctttctggcttgataaccccaaccaacaatgttctcaattgcactttgccagaatctacccacggacgagcctgctgccagaactgtttacaatatgggcagaacggatcggcgaagacgtagacaatgaccggcgcgtcttttttaccgtcgaggagccagtgggattgttccatccgttgccacatttcacgtccggcgggtgcgtaaatttctttttcgataagcgtgttactcaggttttcacctttttcgttgtacatgtaaccagagatagcgtgcttaccatctggagtcaggtagatggtgacgcccatatcctgatacttaccgagataacctttcattcctccaggggcatcgaacgttttgatgattgtaataccctgtttttcaatcgcttttactggggcaggaagttcctctgcgaaggcgattgcaggaagcagagccagtaaaagtatcttttttaacattaatttgtccttttcagtcagtgcaaaagtcgagtaaaaggcataacctatcactgtcataggtaagagcttagatcaggtgattgccctttgtttatgagggtgttgtaatccatgtcgttgttgcatttgtaagggcaacacctcagcctgcaggcaggcgctgaagataccaaagggtagttcagattacacggtcacctggaaaaggggccattttactttttatcgccgctggcggtgcaaagttcacaaagttgtcttacgaaggttgtaaggtaaaacttatcgatttgataatggaaacggattagccgaatcggcaaaaattggttaccttacatctcatcgaaaacacggaggaagtatagatgtccttgattaacaccaaaattaaaccttttaaaaaccaggcattcaaaaacggcgaattcatcgaaatcaccgaaaaagataccgaaggccgctggagcgtcttcttcttctacccggctgactttactttcgtatgcccgaccgaactgggtgacgttgctgaccattacgaagaattgcagaaactgggcgtagacgtatacgcagtatctaccgatactcacttcacccacaaagcatggcacagcagctctgaaaccatcgctaaaatcaaatatgcgatgatcggcgacccgactggcgccctgacccgtaacttcgacaacatgcgtgaagatgaaggtctggctgaccgtgcgaccttcgttgttgacccgcagggtatcatccaggcaatcgaagttaccgctgaaggcattggccgtgacgcgtctgacctgctgcgtaaaatcaaagcagcacagtacgtagcttctcacccaggtgaagtttgcccggctaaatggaaagaaggtgaagcaactctggctccgtctctggacctggttggtaaaatctaaatttcctttgtctttcgcgctactaactccggcgcgagatacttcggaaattcacctaattcttcgggtgctgcggcacccgattttcttccccgcaccatgatgcaagctgcatccagctagccgcagaggccgcttgcatgatgatgtttaaagcccaggagataaacatgctcgacacaaatatgaaaactcaactcaaggcttaccttgagaaattgaccaagcctgttgagttaattgccacgctggatgacagcgctaaatcggcagaaatcaaggaactgttggctgaaatcgcagaactgtcagacaaagtcacctttaaagaagataacagcttgccggtgcgtaagccgtctttcctgatcaccaacccaggttccaaccagggaccacgttttgcaggttccccgctgggccacgagttcacctctctggtactggcgttgttgtggaccggtggtcatccgtcgaaagaagcgcagtctctgctggagcagattcgccatattgacggtgattttgaattcgaaacctattactcgctctcttgccacaactgcccggatgtggtgcaggcgctgaacctgatgagcgtactgaacccgcgcatcaagcacactgcaattgacggcggcaccttccagaacgaaattaccgatcgcaacgtgatgggtgttccggcagtgttcgtaaacgggaaagagtttggtcagggccgcatgacgttgactgaaatcgtcgccaaaattgatactggcgcggaaaaacgtgcggcagaagagctgaacaagcgtgatgcttatgacgtattaatcgttggttccggcccggcgggtgcagcggcagcaatttactccgcacgtaaaggcatccgtaccggtctgatgggcgaacgttttggtggtcagatcctcgataccgttgatatcgaaaactacatttctgtaccgaagaccgaaggccagaaactggcaggtgcgctgaaagttcatgttgatgaatacgacgttgatgtgatcgacagccagagcgcgagcaaactgatcccggcagcggttgaaggcggcctgcatcagattgaaacagcttctggcgcggtactgaaagcacgcagcattatcgtggcgactggtgcaaaatggcgcaacatgaacgttcctggcgaagatcagtatcgcaccaaaggcgtgacctactgcccgcactgcgacggcccgctgtttaaaggcaaacgcgtagcggttatcggcggcggtaactccggcgtggaagcggcaattgacctggcgggtatcgttgagcacgtaacgctgctggaatttgcgccagaaatgaaagccgaccaggttctgcaggacaaactacgcagcctgaaaaacgtcgacattattctgaatgcgcaaaccacggaagtgaaaggcgacggtagcaaagtcgtaggtctggaatatcgcgatcgtgtcagcggcaatattcacaacatcgaactggccggtattttcgtccagattggtctgctgccgaacaccaactggctggaaggcgcagtcgaacgtaatcgcatgggcgagattatcattgatgcgaaatgcgaaaccaacgtcaaaggcgtgttcgcagcgggtgactgtacgacggttccgtacaagcagatcatcatcgccactggcgaaggtgccaaagcctctctgagtgcttttgactacctgattcgcaccaaaactgcataagaagaagtaagattcacctgtaattgcttagccgccggggtcaaacctggcggcttttttattgcattaaaaagccctgcagggatggctccgggcagggcgggagacttattctggcaattaacgcacaaccagcaccggcaaattggcgtggcggattacgctcgaggcgttagaacccaacagatgagttgaaattgatgggttacgcgaaccaatcactactacatctgcatcaagttctttcgctaactcgttaacttcatcccgcacactaccaaaacggacatgttgcttaatgcgggaaggatcgatggtgaagtggctgaccatcgtttgcagacgttcttctgcttcatgttgcagatgctcttcaaaacgacgtacatcagcggcaaaacggtgcaggctcaggctggctgaccccggtagtacgtgaagtagatgaataactccgtcatcctgggcgaggaattcagcgtggcgaatcgctttgtcgctcaattccatttcgaaaacatccactggcatgatgattgttttgtacataagcattctctccttgtttttgcatgtatacataacagcacattattggttatgaatctataatttgcgaggctgatttgatctgaatttgctattgagctggaaaataaataaaaaccaggcgctaccagcgttgttcaaggtatagcactgcagcaacaataattgctgctatgaatatataaaatgcagtgataccgagagcttcgctcatatgaggttccgcagatgaataaccagttcagattagaatgctgcgcttaagagcaaaatgataaatctggttgatatttgagcggaaagaggatgcgagtgcatcctctgggcaaagcgagttatcgcttgtgcagatgggattaaagcaggtaatcgccagcagcttctggctggtattcgagttccagcacttcaaggtgggttgcaacgccgcccggcagttcccagtgaatggaatcgccaacgcgcagccccagcagtgcggcacctaccggagccataacggaaagctgagtattgctgtcggtcatttttgccggatacaccagcgtgcgcacacgcacttcgccatcgctaagattgcggaatttaacccggctgttcattgtcaccacgtcgtgtggcatctcttctggcgaacacatttgggcgcgatccaactctgcgtttaacgcgtcggcgattggcaaaccagcataggcgggttgctccagcagaatatcgatgcgttcggcatccaggtcgttaatgatgatagttggtctggacatttttactccatgtcgtcggtactgcgagtgtcgcagataaacatacccaaaagaaaaccctcaccgtcaggcggcgagggtttaactcacatgatgatactgactgttgctcactctttgaagtgatttgcgtcacattcagggaattcctcaatgtagcgcattatgtataaatcttaatcgtcatggtttatggaagacgaattagcgtgttttgtaaatcagaggattaataacctgctttatcaatcacaaaggttttgccacagttgcctgggtgtggttgtggcaagaatgagttggcagaaagcggagcgttgatggcgtcagctttgatcgagatctgaatttcagtcaaatacgcagggttaccctggcacgttagcttaactgctttcacgttctcttttccccagcttttggcaaaggcggcatcaaagtcacggcggctcactgttttaccgtagttatccgcaaggaattttccggcttcgctctctttaatttcttgattcaggcgtaccatcgtgccgaagtatgcgtctggatcaaaaccaaagcaggcaccgtgtttggcatattcgtagcgttccaggcaggaacgtccgccagctcctggcatgacttcacttagtttagcggccgtttccagtgataacccggtttccggcgatgaacacattcggctggcgcgcgcttctggtagattcgggattgggcgagtagcgcaaccgaagcgcatccagcggcgttcatcaacaccacgggcagcaaccgatttaggcaatcctggccacagaccatgtacggtcagaaaatcagctttgttggtcgtttcggtttgcaggcgacattcatctcgttcgttacgatttcgatcgtgttgactctggcaaaatccggtttgccaggagagggccaggacatagcgatcaaaatcgccatactgttttgcctgcaacgccacggcgttggcagaagagaagggaagcagagaaaccgcgagcaacgcggcgttacgccagaatgctttcataatgggtgtggaactcatacatacactgaatattatctattaaatcataaaaaagcccgcctggtgggcttacctggcgggcgtgatgatttattcagcgtttggcgaacgtattagttccacatggcgagaatcggccagccaaccaacagcagcatagagatgtaaatcaccccgaagattgcgccaagacgccagtaatcttttgatttcacatagccacagccgtaaataatcaccccaggaccggttgcatacggcgtcagacagcccatgataccgatagacagtaccagcaggatacacagttgttccattggtacgcccggaatccctttaccgacggccagaataaccggcagcatggttgcggtgtgcgcagacaggctggcaaacaggtagtgtgcaaagtagaacaccagaaccagtacaatcaccgttgcgtttggtgagaagccttccaggtgtgtactcatcgtgttggcgaaccagtcgataaagccagaacgggtcaggccattcgccataacaaccagcgttgccaggttgaccagcgtgttccatgcgctgttatagcgagtaatgtctttccacggcacaacgtgcagcgccagcatcagcgaaactgccagcagacctaccgcagtagcattaatgacttcactgccaaatacccacaaacctaagctgagcaatacaaggccaatcagcgtccactctctgcgcgtcagcgcacccatggtttttagttcatcacccgcccaggttgccacttcttcactgtgtgtgatttccggtttgtacagcacgtaggaaagccacggcgcaatgataagcaagataaccccaaccggcaggaagcagaggaaccactgcaaccagctaatctggataccggcaattttgctgacgaactccagacccagcacgtttggtgccgcaccggtgacaaacatggacgaactcagactggtactaatgaccatcatccacatcaaatagccgccaatacgacgcgcggacggatcgttcgggaatgatttaaacagcggcggcaggtttttaatgaccggaaaaaccgtacccccggtacgcgcggtgttggacggtgtaaacggtgccagcagaatgtcgataatgacaatcgcataacccaacgtcagcgtgcgtttgcccatgaatttcaccaggaaaagggcaatgcgacgacctaacccggaaacttcataccctaatgcaaaaataaatgcgccaaataccagccataccgtggtgctggaaaaaccagccagaccccatttcagcgcctgtttttgcgcattaaacgctgggtcagctaattctttggcatcaaagagcaggtaattactgccaataacgcaaatagtaaccgcaataaaactgatcgccgttgccggaattggctcgaggatcatgccgacaatcattgccacaaacactgcaaagtaatgccacgcctgcggcggcataccgtcaggtacagggataagaaacatgacacccatcaccaccaggggcgccaataatttccatatattatcttttgctaaagacatacgggttctccgaaaattaatatttccaaatttatcaagtgcttaaataattaaatctgtgctaaaaaccaggtaagaatcagcaggtcggcactgccgcctggactgatatttcgttcgatacactccctgtcgaactgccggagataatcgagatcggcgggggttcggatgcccccattgtttaataatgtttgcgcctcgcgctgtagccagcgcaggcccccctcgccaccgcgcgatgcaacgttggtatcgccgttggtagccatcagtaggagcaaggtatcgagcaatgccagctcaggatctaacccctgatccagcagagtgaggtaatgcggcaaggcgtggttgatcaccagtggataacccgcttcggcttcaccgcgtgcgccggtaaggccaagctgctggtacaaccgttgacctgccgtcagttgtgaattattggtacgcagttcgcgatcggtcaggccacggcagaaacttgccgccgtcgcacaaattgttattggcgttaccgactggttgagttgaagcaaacggccaattgccgcacacagtagccctaaagaaaaaatgctgcctttatgcgtgtttacgcccgcagtggcgcggaacatatcaccttcgcaagccataccaattgggcgtaatccgttgagtaccgcttccggtgccatttctgcactacaggcaccaaattcaatgaaacggggtaaccagccctgaatcgccagcgcgctgcggtggaaatcttccagcgccatatctttgtgcgcaccgcagttaatgcgatccacgaggcctggtttcggtgacaggttgacttcagtcagcatggcgcgccagcccagcagggcgtactcatcgattaatgacgtcgcaagctttgtggttttagttgacgttgcaggcatcgacatcgttcagcagcgcctccatgcggttgagtaaatcggtcagttgatgggtttttccacgcgcgcaaacagctgcgctttgctcgcacaacaggcagcggcgaggcggcagtgaataatcgcggcgggagagaatgtcgccttcgggcgtcaggacatcgatatcccataaccgcccgagaggatgactatgttcaagctcaatggtggcgagcttgaggtcgcgagccggggcggcaatgctcaacatgccctccggcccgctggcggaaaccagtgcagcctgctcctgaatttgccagccctgttttgcggctaaggcacgcaaggctgtcacgccatgattaaaaattcggcgtgtgacctcgctgtctttaatcggcccaggcgcaaccacggtaaaggagaccagtggaacaggatggcgcttgagccaggcgtgttgccgtgcttgcctttcatcccggctgacgagcagctcgggaattgacaccgcatggtggctggcgagttcaggaagcaggtgcatggcttattccttcacctgatgcacaacatcgatcaccgagccatcgcggtaacgcacaacggcaacgacgcggtcggtgaattcaatcggctgtggttcaccggtcagcagacgcgcacgttcacgcagccactcaatagaaaccactttgatccccgcttcctgcagacgttctgccagctccggacgtgccgggttaacagcgatgccgtggtctgtgaccagaatatcgacactggagcccggggtgatgcaggtcagcacgttatccaccagcgtcggaatacgaccgcgtaccagcggcgcgacgatgatggaaagcgcagaagcaatcgcggtatcgcagtgaccaccggaagcaccacgcagtacgccgtcagagccggtcagcacgttaacgttgaactgggtgtcaatttccagcgcgctcagtaccaccacgtcgagacgatcaaccgctgcgcctttcgacccccagttagcgtactggttggcgctgatttcgatgtgattggggttacgggccagcgattgcgcagcatggctgtcaaagctctgcacatccagcagtttgcggatcaaacctttttcgtgcagatcaaccatcgttgcggtaataccgccgagggcgaagtcggcgcgaatatcgcggctacgcattttgtcttccaggaaacgggttaccgccagcgaagcgccgccggtgccggtctgcatggagaaaccttctttgaagtagccagagttaacaatcacatccgcagcgctacgggcaataagcagttcgcgcgggttagtggtcatacgggtagcaccagcgccgatttttgcagcatcgccaacgcgatcaactttgacgatcagatcaacctgatcttgctcaatgcttgccggattatgcggataaggcagcagttcttcggtaagcatcacgacctgttttgcgttgtcggcatcaaccattgcatagccgagggagccgcagcaggctttaccggagtagccgttggcattaccgaattcatcacaggacgggacgccgaggaaagccacatcgatattcagttcgccgctctgtaccagatgcacacgtccgccgtgagagtggatttgcaccggttccgccagcagaccacgggagatttcttccgccagtggaccgcgcaggccagaggtataaatgcgggtaaccacgccctggcgaatgtgttctaccagtggcgcatggcaatcactcagggagctggaggccagagtcaggtttttaaagcccatcttcgcgatgacgtccatcaccatattgacggtcaggtcaccgccacggaaagcgtgatggaaggaaaccgtcatgccgtcctgtaaaccagagcgacgaatcgcttcttccaggttggcgcacagtttgcgatcgcgcgctttttcagcctggtaggtttgctttggcgagttctggaaagcggcaagatcgcattcagcgcgacgattccaggccgctacccgttcttgtcgttgagattgttcaattttctgcgtcattttgattgccttattcttcgcggatgccggaaagttctgcgcgggagagcaccagacgggcgcgatcgataaccggaccgtccaccatcttgccgttcagggaaaccacgccgaggccttcgcgagcggcggcttcagcggcttctacgacgcggcgggcgtgatccacttctttctgggtcggtgcgtagaggttgtgcagcagatcaatctgacgcgggttgatcagcgatttgccgtcaaagcccagctgtttgatgtgggcggcttcttgcaggaatccggcttcgttgttagcgtcggaatagacggtatcgaacgcctgaatacccgcagaacgcgcggcctgcaaaatggagcagcgagcgaacagcagttcagttccttccggggagcgttctgtacgcaggttgcgcacatagtcttctgcaccgagggcgataccgatcaaacgctcggaagcgtgagcgatttctaccgcgcgggtaatgcccagcggagattcaatcgccgccagcaggccggtactgccgggttcacgaccacaggctttttcgatacgcaggatctctttttcgatatccagaacatcctgagcggtatcggttttcggcagacgcacaacgtccgcaccaccgcgaacgacggcttccaggtcgttaacaccccattcggaatccagcgcgtttacacgcacaatggtttcaatatcgcgataaagcggatgttgcagcgcgtggtaaaccatgcggcgggcggtgtctttttcacgcaatgcaacggagtcttcgaggtcaaacatcagggcatcagccgggtagatgaaggagttgctgaccatcgcggcattagcaccaggcacaaacaacatactgcggcgggtgcgagttttacgttgttgcagcgaagcggaaatcattggcaatcctcccatggcagagccgggataccgctggcgcgtgccagcagggcttccagtcgtgcacgtaaaatgcagtccagtgcgcctttgtcatcgacattcagctgtacgccgcgcacgttgtagcgggcgagaacttccagaatggtggtgcgaattgcatcgccaaactgtttctcaacgctgctgttgatttgcaggtcgatatcctgcgtatcgagtggggcgatgcgtatcatcacatccccagactcaagggtgcctgcaacggcgggctggtttattttcatttttcacctgtttctcatgcgggggtcttttgacgagctgccgcgtcctggcgggagtgctcaagcaggttctgcaaataatgcagcgtgactgcagggaccagcggcgcgatagccgtgagatcgttttttgccagcagttgacgtacccgggaagcggatatcggcatctcctggtaacgcagccgctcaatttcaaccagttcgatgggcggtgcggagatagtcggtgtttccagccagtagcgcatatcctggttgtactgggcagtaacgcgacaaaagggttcagtaccgacaaagcggtgagttacacccagcgcgggagcgaggtactgacggaaaatcttcagatcaatttcggtgtaacaatggttaatgacgctctgttctttaatgaagtagcaagggaacgtagcgcgggagatgatgtattcggagccgcgatgcacagtcaggcgtggaatatcggcggtgccttttaacaccagatccagccggtcttcataggggaagcgtgaagaatcttctttgactaaaaacagatgcaaccagtcgcactgtgccgcagcctgttgaatcagataacggtgaccattcgtaaagggattggcgttcatcacaatgcagccaatcttgttccctggatgacgaaattttttcagcgattcggcatagcgtttcagtcgcgtggcgctgttttccatcagcaccatcacgccgggtacgctggtcagcgtggaaaaaccgcactggcggaacagcgcctcgtattcggttttggtataaataaacagatgcgtgctatgccgctcataggcgaggtttatcagttcagtggctaatgtcagcgccagtccttcaccgcgaacggattcactgatagcaacgcatttaataatatttccggcaattccaccgcacgcgataagcttttcatcgcgggttacggtaataaatacttcgactgtggtgtcaacgctcaaatcattttcatgcaggaattgggcgatttccgccatttttttattttctgaacgttttacgcgggtgaaaatatcattgccgaacataataaatagtatcctgaaggtgcatgttgttatcgatttgcaacgaatgttgttcaatgttgcaaattgataaccttttattttcacttgggagaaaggggggcgatcgaggtatatctttttctcctttcgctatacatcctaaggagtatttcggcgtgaaattttgatttatttcacatagagttagtggttttttatttatttaatggttttaagttttttaactaatgtaattacgaaataacccgcaggtttaagtgatttaattgatttaatgaataaaatttgccacgatcatatttaatatctatgtattttgattcaacattttaattacatccgtcaaagaggctcgggacaacccgcaaggaaaacaatgttgcagcttaaagagaataaacagtttgcatttttccaaagactggcatttccgctgcgtatctttttgctgattctggtgttctcaatatttgtcattgcagccctggcgcaatattttacagccagttttgaggactatttaacgcttcatgtgcgcgacatggcaatgaatcaggcaaaaattattgcttctaatgacagtatcatcagtgcagtgaaaacgcgtgactacaagaggctggcgaccatcgctgacaaattacaaagagatactgatttcgattatgtggtgattggcgatcggcactcgattcgtctttaccatcctaatccggagaaaattggttatcctatgcagttcaccaaaccgggcgcgctggagaaaggggagagctacttcatcaccgggaaagggtcaattggcatggcgatgcgtgccaaaacgccaatctttgatgacgatggaaaagtcatcggcgtggtgtcgattggctatctggtgagtaaaatcgatagctggcgggctgagtttttattaccgatggcaggcgtgtttgtcgtgctgttagggattttgatgttgctgtcgtggttcctggccgcgcatatccgtcggcagatgatgggcatggagccaaagcaaatcgctcgcgtagtccgtcagcaagaggcgctgtttagttcggtttatgaagggctgattgcggtggatccgcacgggtacattaccgccatcaatcgtaacgcaagaaagatgctggggctgagttcccccggacggcaatggttgggtaaacccattgctgaagtggtcaggcccgccgatttctttaccgaacagattgatgaaaaacgtcaggatgtggtggcgaactttaacggtctgagcgttattgccaaccgggaagctattcgttctggcgatgatttactgggggccattattagctttcgtagtaaagacgaaatttccaccctcaatgcgcaactgacgcaaattaaacaatacgtcgagagccttcgtacattgcgacacgagcatctcaattggatgtcgacgctcaatggtctgttgcagatgaaagagtatgatcgcgtgctggcgatggtgcagggggagtctcaggcccagcaacagcttattgacagcctgcgtgaggcgtttgccgatcgccaggtggcggggctgctttttggtaaagtgcagcgcgcccgcgaactggggctaaaaatggtcatcgtccccggtagccagctttcgcaactgccgccaggactggacagcaccgagtttgcagccattgttggcaatttacttgataacgccttcgaagcaagcctgcgtagcgatgaaggaaacaagagcgttgaattattcctcagcgatgaaggcgatgatgtggtgattgaagtcgccgatcagggctgcggcgttccagagtctctacgagacaaaatatttgagcagggtgtcagtacgcgtgctgacgagcccggtgaacatggcattgggttgtacttgattgccagctacgtaacgcgctgcggtggtgttatcactctcgaagataatgatccctgcggtaccttattttcaatctatattccgaaagtgaaacctaatgacagctccattaaccctattgatcgttgaggacgaaacgccgctggcagagatgcatgcggaatatattcgtcacattcccggattcagtcagatattactggcgggaaacctggcgcaggcccgaatgatgatcgagcgttttaagccggggctaatcttgctcgataactatcttcctgacggtagagggattaatttactgcatgaactggtgcaggcgcattatcccggcgacgtggtgtttaccactgcagccagcgatatggaaacggtgtctgaagccgtacgttgtggtgtatttgattatctcattaagcccattgcctatgaacggttggggcaaacgctaacccgtttccgccagcgtaaacatatgctggaaagtattgatagcgccagccagaagcaaattgatgagatgtttaatgcctatgctcgcggtgaacccaaagacgaactgccgaccggcattgaccccttgacgctaaacgcggtgcgaaaactgttcaaagagcctggtgtgcaacatacggcagaaacggtggcgcaggcactgaccatcagccgcaccactgccaggcgttatcttgaatattgcgccagccgccatctgattattgctgaaattgttcacggcaaagttggcagaccgcaacgcatataccacagtgggtgacatgataaagccggaggaaacttgcctccggcattactatttacttgcctgtgaccgctgctgccgttcctggcaccatcagctctgtagcaacgataacaatcaccaaaccaacaagcaccggcaccgaggtgcgttttacgacttcaaacggcgagatcttcgccatcccggcaaccgcaacgactacgccagaaacgggtgatagggtacgacccaggtttgacgcctgcagcatcgggatagtcaaatacgccgggttaatgccggaggagtgcgccagtttcgggatcatctcaacaaacgcataaaacggcgcattgcctgaaccggtcgtgactgccgccagcattgtcaggatcaccaataccagcatcaggatgatactcgccgaaccaaacgaggtagcgatagaaatcagactttgaataaagccgatggtgctaagcccctgagcgaataccccagcggcaaccagcagcatcaccacgttagcaaatgcatctgccataccgcgataagccacttccagaccagagaaaactttctgggtattaaagctgcggatgaactccagaatggaggcaattagcatacaaatcaccagaatagtgatgatgtgtaattgcggaccccatttgccgtcaaaaatcagtactccgatgatcggcgtgaacggcaaaatggcataaaacgcaggggcagtggtggtgatttcactgacatctaacatttcatgagagatgtgctcttttttatccagataacgttgccagaagaagtgggcgatcgccatgccgataattgcagcaattgagataggcagcgttgttttgaaggcgaagtcaatcagcgacatttcggaagcctgcgccgccagcaccacatcccctgaagtcggtgcgagaataatcgccgccggggaggcacaaatggcagcagctgcgccacgactgataccaacgtttaccatcaccggaaacagggttgccatcagcaaaacacccagaccggttgcggaagagacggccagtgacatcagacaggcaacaaaataggcggcaatcatcagaaggtaaggggagttaatatactgcaatggttttgacgccagcttgaccaccatatcattcgcgccgatatgggtcatgtaagcggcaaagccacacagcatcataatcatcatgccgaggtcgccgccgcggctcattagcaatattttaacgtattcaacgatatccgtggcgctgtagcctgttgaagcctggctggacggtaacactttgtgccccataatggcactgataatcagcaataacaggccaccgacaaataacacgccagtggcagaataccctttaatgatgtagcgagctacacccacaataaccacaaccccaataaggagttcaatgaatgtcagcataatttttcctgtctccaggccccaaagtaaataataaaaaattcctaaaagttaaggaaaaaatatgcccaataaattggcggtgaatgctgattaaaatcaagaaaaactgccattaagacattgaagttgctgtttttatacgtagataacaaaacgcatatttagcggttggcaaatatcacataataatgtgtgtaaattgatggtggattgatgcaaatttgttaattgtaaggtgttagctgcggttgtgtgctcaaaaaataatcttccatgagcatgagttgacgatacataatatatttttcgttaagatattttttatatcttattaaaaaataaagtaatttttatcggttgtattttgttatcagaaacgacttggtttttcttttatgactattcccatcgcagaaaacgatgcgtcgtctttaatcgatgcgcggaaatatttatcttgaactagcggaaataaatagggcagctattcatattattcttcatgttggggctattgaggttatgttaattgtagctttgctatgttagtagtagatttttgataaatgtttaatggtcacaaatgaacgtgagtaaatatgtcgctatatttttctttgtttttattcagttaatcagtgttggtaaagtttttgctaacgctgatgagtggatgacaacgtttagagaaaatattgcacaaacctggcaacagccagaacattatgatttatatattcctgccatcacctggcatgcacgttttgcttacgacaaagaaaaaaccgatcgctataacgagcgaccgtggggcggcggttttggtcagtcgcgttgggatgaaaaaggaaactggcatggcctgtatgccatggcatttaaggactcgtggaacaaatgggaaccgattgccggatacggatgggaaagtacctggcgaccgctggcggatgaaaattttcatttaggcctgggatttaccgctggcgtaacggcgcgcgataactggaattacatccctcttccggttctactgccattggcctctgtggggtatggccccgcgacgtttcagatgacctacattccgggtacctacaacaatggcaatgtgtactttgcctggatgcgctttcagttttgagacaaatgaagttttagtaaatcctttaaaatcaaccagtaaaataattaacatcaaaaataacgcgacttttatcactttttagtaaagttgcactggacaaagcgtaccacaattggtgtactggtaaccgacacagcatttgtgtctatttttcatgtaaaggtaattttgatgtctaagattaaaggtaacgttaagtggtttaatgagtccaaaggattcggtttcattactccggaagacggcagcaaagacgtgttcgtacacttctctgcaatccagactaatggttttaaaactcttgctgaaggtcagcgcgtagagttcgaaatcactaacggtgccaaaggcccttctgctgcaaacgtaatcgctctgtaagatacgtcagcaagaattcaaaacccgcttaatcagcgggttttttttggtttttagtgtgcggttgaggccgaaaacagccagaaagccagtgcggtcatagcaaaagaccccaaaagattgacgaaaacgttcagtaacgcccagccaaagcggccctcttgtaacaaaaacaccacttctgccgaaaatgttgagaaggttgttagaccgccacaaaatccggtggtgattaatactttccacactggatcaatgttcgtcatcctgctgaaccaggcgaatcccattcctatgatgaatgccccaatcaggtttgctgccagcgtccccaacggaatcgcctgatgcagcgggttaaatcgcatacttaacagccatctcgccacgcttcccgtaccaccgccaataaaaactgctaaaagaagttgtaacactgcaaaatcctgctatttgatttgtatgagtgataagtgtaacgccgaataatcgccgttggcgaattttacgactctgacaggaggtggcaatgctggttgccgcaggacagtttgctgttacatctgtgtgggaaaagaacgctgagatttgtgcctcgttgatggcgcaggcggcggaaaacgaggtttcgctgtttgtcctgccggaagcattactggcgcgtgatgatcatgatgcggatctttcggttaaatcagcacagctgctggaaggcgaattcctcgaccgtttacggcgagaaagtaaacgtaacatgatgacgacaattctgacgattcatgttccttcaacaccggggcgcgcgtggaatatgctggtggcgctacaggcaggaaacatcgtcgcccgttatgccaaactgcatctctatgatgcatttgccattcaggaatcacgccatgttgatgctggtaatgaaatagctccgttactggaggtggaagggatgaaggtcggtctgatgacctgttatgacttacgctttccagagctggcgctggcacaggcattacagggagctgaaatcctggtacttcctgccgcctgggttcgtgggccgctcaaagagcatcactggtcaacgttgcttgccgctcgtgcgctggataccacctgttatatggtggcggcgggggagtgcgggaataaaaatatcgggcaaagccggattatagatccctttggcgtcaccattgcggcagcgtcagaaatgcctgcactcattatggcggaagtgacgcccgaacgtgtgcgtcaggtacgcgcgcaactgcccgtcttaaacaaccgtcgctttgcgccgccgcaattattatgatgtttttttactcggcgcttgattcaccttgttacagattgctattgtgtgcgcgcgtcgaatgaccgttaatattctctggtttttaaggcgcgttctgttgccggttatatgtcaagaaggtatctatgggtgagattagtattaccaaactgctggtagttgcggcgctggtcgttctgctgtttgggactaagaagttacgtacgctgggcggagaccttggagcggccattaaagggttcaagaaggcgatgaatgatgacgatgctgcggcgaaaaaaggcgcagacgttgatcttcaggctgaaaagctctctcataaagagtgacgtggcgagcaggacgctccctcaatatcttgttcgatacaaaaacccgcttcaaaaagcgggttttttatcagacagatgtaagtaattattacaggattacttaacttccatccctttcgcctgcaaatcggcgtggtaagaagagcggacaaacggaccgcatgcagcatgggtaaagcccatcgccagcgcttcggctttcatttcgtcgaactcatccgggctaacgtaacgttgaaccggcaggtgatggcggcttggctgcaaatattgccccagcgttagcatcgtcacaccatgacggcgcaggtcgcgcattacctcaataatttcttcattggtttcacccagtcccaccatcagaccagacttggtcggtatttccggatgcgcttctttaaagcgttccagcagcttaagcgaccagttgtaatctgcaccaggccgtacctgacggtaaatacgcggtacgttttccaggttatggttgaacacatctggtggcgttgcagtcagaatatccagagcacgatccatacgaccgcggaaatccggcaccagagtttcaattttgatttgcgggcttttttcccgaatggcagtaatgcaatccgcaaagtgctgggcaccgccatcgcgcaggtcatcacggtcaacggaggtgataaccacataacgcagcgccatatcggcaatggtctgcgccagtttcactggttcattggcatcaggagctaccgggcgaccgtgggcaacgtcacagaacgggcaacggcgggtacaaatagcgccgaggatcataaacgttgctgtgccgtggttaaagcattccgccaggttagggcaggaggcttcctcgcagacagaatgcaggccatttttgcgcattgcggctttgatgccctggatacgtgtagagtccgctggaagcttgattttcatccattccggcttgcgcagcagggcttcgcgctctgttgccacgtttttaaccgggataagggccatcttatcggcatcgcggtatttaacaccgcgttccatcacaatgggtttactcatagcgtgcgtgttccagttgcgaattacgaaggaaagcgtttcaattcaatagattgttgtaattatcaactatttttgaattaacgactggcagtatatcattgaaacggacctgaaagcagccaaagcggtcgcgaaaatgtaaaattgttgttggattgtgccattttatcgttctgcgctgtgatctggctgtaacaatactttttcaaaatgcattacggataacatctatggtcctgtgcaaaacatgttatcggtgatgagatcggtttgaaactgactgagttggttttccgcgccgctgatgggcgggttgcgcagtaaaagctgtggatagtgagttttaatcgcccgatagatgacaggaaggaccagggctccgaccgagggggggcagattaagcactttcgctgcattaacgattcctttatggacatatgcaacttcaaaatagtcagaagagtaagatcaatatttcgtaaggttgtaaatatttgtggtttaccttctgacgattttctacttaaacagggttcaatttgattattactatccacgcacttactcaaattttattcatggaaaaataatatttataaaaatcacaataatcttatgtctaattgggacggaacgcttttgctcaccatggtaattatttcaatgagttaaccaattgggtgagctacggagcaaggcgtagcatcgcatttctgcaagtgataaagaaaatatacaaacgcgaaggagatgtaaagcattagcaggtattatgagtaatgacccagtgtaaattgggccattgatgtatggaattaagcggtaatatattcgaagtcaggattgtttagtagcgctaaaatattttccagtaaacgtggtgcaatattattagtcgtcgcttcgggtttccattgtgatattttagccatttccattcctgcatacccacaaggattaatacgtaaaaatggtgaaagatccatattgacgtttaatgccagaccgtggaatgaacaaccgcgtcgaatacgtaaacccagtgagcaaattttcttttccccgacatagacaccaggcgcgtcagcccgaggatgcgcttctatacccagttcagccagggtattcaccactgtttgctcaagcaaggtcaccagttcacgcacaccgagtttacggcgtttcaggttaagcaacacatacatcacctgttgccccggcccgtgataagtcacctgcccaccgcgatcgctctggatcaccggaatatcacccggcattaaaatatgctccgcctttcctgcctgcccttgggtgaataccggatagtgctcgaccagccagatttcatcaagggtactatcatcgcgggtatcggtgaattcatgcatagcctgggagattggctcgtaaggctgaagaccgagctggcggacaagaattttatcctgatacaaaacggcatctccgtggagaatgagtaaaagtgggggaaaagtatatcacagcgaggagaggggagttacccgaccaggagccgggtaacggagaagcgagttacagaaccatgcggacaatatcgattttgcccagttcttcatacagtgtttcaacctgctcgatatgagtggcgttgatagtgatagataccgagtggtagttgcctttgctgcttggttttaccgttggggtgtagtcacctggcgcatggcgctgtaccacttcaaccacctgatcaaccagctcaggtaacgcctgccccataactttgtaagtaaaaggagtagggaattcaagcagttcgttaagtttggttttcatgtcagctccggcgtaacgtaattaaatagcaactcccgccagaaggcgggagttttttactgatgcttagtatatggggacggaaattacactttcaagtgttcaatttttaaccaaaccagtgatggaacattaatttaatgtaatcaatgattttgccgaagaagttaccttccggtatttcttgcagcacaaccagcgggcgttgttcgatcgttttgccatcaagctggaagttgatagttccgacgacctgattcttttgcagcggcgcatgcaattcactgctgttcagcacatagctggctttcagatctttcatgcgaccacgcggaatggtcaggtacacgtctttatcaacccctaacgaagcgcgatcagaatcaccaaaccaaaccggttcagaggcgaactctttacctactttcagtgggttaacggtttcgaagaaacggaagccccaggttagcaattttttactttcggcttcacggcctttaaaagtacgtccgcccatcaccgcagagatcaagcgcatctggccttcagtcgcagaagcaacaaggttgtaccctgctttgtcagtgtgtccggttttgatgccgtcgacattcaggctgttatcccataacaggccgttacggttcagctggcgaataccgttaaacgtaaattctttttctttatagatcgagtattcattcggtacgtcacggatcaacgcctggccgatcagcgccatatctcgcgcggagctgtactgaccatcagcatccagaccgtgtaccgtctggaagtgggtatttttcaggcccagggcgttaacgtagctgttcatcaagccaacaaaagcgtcctggctaccagcggcaaaatcggccatggcgacacaagcatcgttacccgattgcaggttaataccgcggatcagctgagaaaccggaacctgcatgcccggtttgaggaacatcagcgaagaacctttaaacaccgggttaccggtggcccatgcgtcgttgccgatagtgactaaatcagtttctttaaatttaccggctttcattgcctggccgataacgtaactggtcatcattttggtcaggctggcaggatcgcggcggacatcagcgttctgttcggcgagtactttgccggagttgtagtcaatcaggatgtaggactccgcgtcgatctgcggtacacccgggatcatggttttgatattcaggtcatcggcatgtgcagcagagataaaggctgtgcaaagagccgtggtgagcgccaggcgcttcatgatacgagcggaaaaaatggtattcatggtctgaactacgacatccgtgatggaattaaaaaaagtgccctactatagcaaatgcactaccggcaggcatctgactttccgcgtgactttgttaacgtcatttacagaaattgacacatcagatgcctgctttacgctactgcgcggtggtaataaatgactgtaattgggcttcggtttgcaaacgttgctgcaaggtactggcttcggctttgctggcgaatgggccaagctggatccgccagaccgcgccattttgagttacgcgaccggggacgccgaacttctgtcccagttgctgttggtactgttgcgcacgagcctgatcgctaacggccccgacttgcaccataaagttgccgctggcgctttgcgaggcggcttgcggtgtcaccattgcaggtgaggttgcaggcgttgtcgacggagctgtaacaacgggctgtggcgcaggcgtcggttcgctgccttccagtacaccaggcgctaaggtcgttggtgcgccgaggaaaccgctgctggttaccggcgcgccggtcggatcttcgctttttagcgtcgaattactgaccggaagaatgtcaccctgcgggacaggcactgaacttgttcccgcgccaccgcttaaatcgggaggtgctggcagggcgtaagtctgtttggcgactgtggtacaagccataccaggaccagaaagcgaaccatcctgggcgacaataatcggatcgatacgaactttggtgttgtttgacgtgttaagacggtcagctgccgcgcgagaaagcgaaatcacgcggtcgttgccataagggccgcgatcattaatgcgcaccacgatcattcgcccgttagccaggttagtgattctggcgtagctggggattggaagcgttggatgggccgccgtcaactgtgtcggatcgaaagcttcgccagaggccgtcaggttactgccgggttcggcatcatagattgccgccagtcccgcctggctaaatcgagacggatcctgcacgattttgtagcttttaccgtcgcgctggtaatcctgatttgccgtcgcgttcagtggttcgaaacgcgggtctgccccgctaatttcaactatggggccgttacataccgcaggctgcggtacacttaccgtctgttgctgaccatcatcgcttgtacatgccgcgagcattcctgccgcgatgcagatcccgagccactgcttacgcattgcgcacctcttacacgcttttcgacaacattttcctgtgggtgtggattgacattacaatcccgaacccagccatcagcacaattagcgccgatcctccataactgaccagtgggagcggaacccctacaaccggcagaataccgcttaccataccaatatttacgaagacataaacgaataatatcagcattaagccgccagccatgacgcgaccaaaggtggtttgcgctctggcggctatccacagcccgcgcatgatcagcagaatgtagagagcgagcagaatcaaaatgcccactaatcccagctcttccgccagtaccgcgaagataaagtcggtatggcgttcggggagaaattcaagctgtgactgagtgccgtgcagccagcctttgccgcgtaatccgccggagccaatagcaattttagactgaataatgtgatagcctgcgccgagtgggtctgattccgggtccaggagcatcattacgcgctggcgctggtaatcatgcatcaggaagaaccacagaatcggaatgaacgccgctaccagcactactgcgacgccaatcagacgccagctaaggccagagaggaacagtacaaacaggccggaaagcgcaacgaggattgatgttcccaggtcaggctgtgcagccaccagcagcgtgggcataaatatcagcaccagcgcgatagctgtattcttcaatgaaggtgggcaaacgtcgcggttgataaagcgtgcaaccatcaacggtacggctatcttggcaatttccgacggttgaaaacgaacaataccgaggtccagccagcgttgagcgcctttagagatggcaccgaaagcatctaccgccaccagcaaaataatacagatgatatagagatagggggcccagccttcataaacgcgtggaggaatttgcgccatcaccaccatgatgaccagacccatcgtaatctggccgattttacgctccatcatgccaatatcctgaccgctggcgctccagataaccagggcgctgtaaaccagcaatgccagtaagatcagcagcattgtgggatcgagatggactttatcccagaatgtttttttattcggattatccgtcatgattaatggtcctccgctgcggcaaccgctggattttccgcaggcagatcggtgttgttatcacccagcataatgtggtcgaggatctggcgcatcagcgtaccaaccgccggacccgcgccaccgttctccagaatcatggcgacagccacttgcggattgttgtatggcgcaaaggcggtcatcagtttgtggtcacgtaaacgctcggcaattttgtgcgcattataggtttcgttcgctttcagaccgaagacctgagcggtaccggatttcgccgcaattttgtacggtgcgctggcaaaatatttatgcgccgtaccgttagggcggttagcaacaccgtacataccgtctttcgccagctcccagtaaccggaatgaatatcgccgacgggcggttcatgcggttgtacccatggcacctgtttgccgtcttcggcggtgctcatcagcaaatgcggaaccttcacgataccgtcattaatcaggatcatcagtgccttactcatctggataggggtcgccgtccagtaaccctgaccgataccaaccggaatggtgtcaccctgataccacggttttttaaagcgtttttgtttccattcgcgggttggcatgttaccggaacgttcttccgccaggtcgataccggtgtaatgaccataaccgaatttccccatccattcggagaggcgatcgatccccatatcgtaggccacctgatagaagaaggtatccgcagattcttccagcgatcttgtgacattcagacgcccgtggccccattttttccagtcacgataacgtttttccgaacctggaagttgccaccagccggggtcaaacagcgtcgtattgcgcgtgatcaccccggcactcaatgccgaaaccgcaacatagggtttaactgtagacgcgggaggataaaccccctgtgtggcgcggttcaccaacggtgtattcgggtcgttcagcaaggcggaataatctttgctggagataccgtcaacaaacaggtttgggtcataactaggcgtggaaaccagcgccaacaccccacctgtacgcggatcggtgactaccacagctgcgcggctacccgccagcagcgtttcaatatattgctggagtttgagatccagcgtcaggtaaatatcgtgtccggcttgcggtggtacttcttttaactggcggataacacgcccacggttgttaacttcaacctcttcataaccggtctgaccgtgcagcacgtcttcatagtaacgttcaatgcccagcttaccgatatcatgcgttgccgcatagttggccagtttgccgtcattattcaggcgttcgacgtctttatcgttgattttcgacacatagccgatgacgtgggtcaacgctgaaccgtaaggatagtaacgacgtttatagcctttaacttcgacgccaggaaaacggtactggttgacggcaaagcgagctacttgtacttcggtcaggttagttttcaccggaatagaggtgaaacggtgtgaacgtgcgcgctcttttcggaatgcagcaatatcatcatcggtcagatcaaccacgctgcgcaaagcgtccagcgtttgctgcacgttatcgactttctccggcatcatttctatctggtagatagtgcggttgagagccagagggataccgttacggtcgtagataatgccgcggctgggtgcgataggcaccagcttaatgcggttttcattagagcgggtctggtagtcggtaaagcgaacaatttgcagattatacaggttggcgataagcacgccggtcagcagcaaaatccccaaaaaggcgaccagcgcccggcgcacaaacagcgcggactctgccgtatagtcgcgaaaagagttctgtagtttcatccgctgcgttttctactcaaagctcacttatcactcacggtgataaggatggttggtggtgatgctccacgcccggtacagactctctgcgaccagcacgcgaaccagcggatggggaagggtaagtgccgacagcgaccagctctgctccgccgccgctttacaggcaggcgacaacccttcaggcccgccaatcagtagactgacgtcgcgaccatccagcttccagcgttccagctcagcggctaactgcggcgtatcccagggcttgcctggaatatcgagggtgacaatgcggtttttgcctgcggccgccaacatctgctcaccctctttgtcgagtatgcgcttgatgtccgcattcttgccgcgttttccggccggaatttcaatcagctcgaagggcatatctttcggaaaacgacgcaggtactcggtaaaaccggtttgtacccagtccggcattttcgttcccacggcgacaagttgcagcttcacgcattaactccagagtttttccagttcatacaggcgacggctctcttcctgcatgacatggacaatcacatcgcccaaatccacgacaatccagtcggcgctgttttcaccttctacgccgagcggtaacaggcccgctgcgcgagactcctgcacaacgtgatcagcaatggacataacatggcggctggacgtacccgtacagatgatcatgcagtcggtgatgctggatttgccctgaacgtctaaggcgatgatgtcctgacctttgaggtcatcaattttgtcgataacaaaatcctggagtgctttaccctgcaagttttccccctgggtgaatcaaatagataaaaatggtctgtcagtatacctgaaccagaggcgatttcgggacaattgtcgccgaatcggctttcgaaagtgggctatcatcccaccccgcgccgcagattgcatcgccatttttgtaaaacaatttctacaaagtcgtgtctggcggaaaaagtctggctgcggagaatatcagcctgcccggggctgtcaatggtcgttgcggcttacccgtaaaaaaacagaaaagtcatgcattctcgacccagatggcacggctattgaggacgcgtagcgtcgcgaatttttggttgatatcaatggcgctccaacacccctggtcaacgcggaaatgccacatagactcggcaggcatgccaattaaacgagcaattaacagactcagtacgccctgatggctgacgactaaaatattctgatagtgctgatattcactaagccttgcgataaatcgttccacacgttgcgaaaatgcctgaaatccttcaccgttcgtggggatagcatgctgccagtcattgcaccacgcgctatagttttcggcatcttcttgcatgaggtcacgatgatgtcgcatctcccagtcgccaaaaaacatttcattgagttcagggatgatatgaacggggtgctggcggtcactgagaacccgtcgcgcggtatgctgtgcccgttccagttcactgcataaaaccaggtcaaaggaaacatcatgtagcagcgtatgcagattttgcgcttgctcaataccgcgcgcggtcaggggtgtgggcgcatgaccgctgtacagaccatcgacattcgcttgcgtttcaccatgacgaattaaccacagtcgcatcatgccctccttaacgacaggtatcagcgatacaagccttgttggttaatgtaagtcagtaccggttccggtaataaatcctcacacgattcaccattttgcaaacgttcgcggatgatggtcgccgagatgttaaaccacggcgtttcagccagataaattttaccggcaggctgaaggtgaagatcttccgggttatgtgtcaaatgatcctccagccattgctgatattgtggttgtgccatttcaagtgggtaaccaggacgccgacagacgatcaaatgtgcattgtcgagtatcgtttcgtattcgtaccaggtcggaaaggtcagcaatgaatcctgaccaataataaacgccagcggcacgtccggtccttgctcctgccgccactctttcagtgtttgcgcagtgtaagagggggcattgcgctttagctcgcgttcatcaagagtaaataatggcttgtcggcaatcgccagttcaagcatgtgtttacgctgcatgctgtttgcttccggctggggacgatgcggaggaacattattagggatgattgtgacccgcgtcagaccaatcaaattcgccagcgtttccacgggtttaagatgaccatagtgcaccggatcaaaggtgccgccaaacagagcctgtaaagatttcatatcaaccgtcgataaatacgtccgccaggggtttatggcacaacagaagagataacccttcaagctctgcccacactgactgaccgtaatcttgtttgagggtgagttccgttcgtgtcaggagttgcacggcctgacgtaactgcgactggcttaagcgatttaacgcctcgctcatcatgccccggcggttctgccatacccgatgcttatcaaacaacgcacgcagtggcgtatgggcagactggcgtttcaggttaaccagtaacaacagttcacgttgtaatgtgcgcaacaaaataaccggttcgctgccttccagacgcagttgctgaagaatatgcaacgcgcgcttactttttcccatcaacaaagcatcaacccaatgaaaaggggtgaaatgcgcggcatcattcaccgcctgttcaacgcgcggtaatgtcagtttgccgtccggccagagtagcgataaacgctccagtgcctgggccagcgccagcaggttaccttcataacagtagcagagcacctgatttgcagcgtcatccagttctaagttgagctgttttgcgcgcgcagcaacccagcggggcagctgagcctgctccggtgtctgacaggtcacctgcacgctgcgattcgcaagagcagtaaaccaggcggcattttcttgcgctttgcttaatttattaccgcggacgatcaacagtagatcgtcatgcagaagtccggtgagtgtgagaagttgttcattgatcgccgcattcggtccgttttcgggtaacaacagcaatagcgtttgtcgactggcaaacaggctcatggcctggcataacgaaaaaatcgcattccagtcggtgttgggatcaatggaaaaagtgtggtgttcttcgaacccttgagccgcagcgacctgacgaacagcgtcctggctttcctgcaataacagaggatcgttaccaagtaaaagatacgccgcgcgcagcccttcattgagctgcgcgcggagttgttccgggtacaaccgaatcatcagttacccagcgtggtggagacgcgtgcaggcgttgccggagtatccgttgtggtcgacgtctgttcttcgtcggaacgaatatccgcagcacggatgcttggcagcttacgaatcagctgttcggcagcacggtcgtacatctcttttacgatcatgtcttgttcgttatctttcgctaacgccatttgcgggttatcgaagaacgaacggaagactttggcgctaatcgggtagatatcacggccggggatcaacacggtcgcattcaccgtcatgatcatctgatactctgctgtttgaccgttacggaataccgatgcggtatctttcgcgatgctcactttacccaaacgcaaggatggaacgtccttacgcgtggtttctttatcaagcaactcgacaccattcagacgtaactgattacgcaccgcacggcttaatggcccgttcggatcgcctgagtccaggatcatgaccttcatagtggaaggaacctgcgtggtgtcacgcagatgccagccacacccggcggtgattaacaccgccagagataacaacaatgttgccagatatcgcacgcttcctcccgcgcttagccaacgaccagattgaggagtttaccgggtacgtaaatcactttacgtacagtaacgccatcaagatattttgctaccagatgttcctggccagcacgttcgcgaacctgttcttccgttgcgtccaccggaacggtgatttttgcacggactttaccgttaacctgcaccacgaccagcgtggagtcttccaccatcgctttttcgtcagcaaccggccacggcgcgttgtcgatatcgccttcgcctttcagttcctgccacagcgtgaagcagatgtgcggggtgaacgggttaagcatacggactaccgccagcagcgcttcctgcatcagggcgcgatcctgctcgccatcggtcggtgctttcgccagtttgttcatcagctccataatcgccgcaattgcggtgttgaaggtctgacgacggccgatatcatcggttactttagcgatagttttatgcacatcgcgacgcagcgctttctgatcttcagtcagcgcatcgacgttcagtgccgcaacatcaccttttgctgtgtgctcgtacaccagtttccagacacgtttcaggaagcggttagccccttccacgccggattcctgccattcgagagtcatatcagccggagaagcaaacatcataaacagacgaacggtgtccgcgccgtaacgttcaaccatcacctgcgggtcgataccgttgttcttcgacttggacattttgctcatgccggtataaaccagttcatggcctgccgcatctttcgctttcacgatacggcctttctcgtcacgttcaacgatagcatcaaccggggaaacccagttacgttcgccgttttcaccaacatagtagaaggcatctgccagcaccataccctgacacagcaactgtttcgctggttcgtcagagttcaccatgcctgcatcacgcatcagtttgtggaagaagcggaagtagagcaggtgcataatggcgtgttcgataccaccaatgtaaatatccaccggcagccagtagttagccgctttggaatccagcataccttctttgtactccgggcaagtgtagcgcgcatagtaccaggaggactccataaaggtgtcgaaagtgtcggtttcacgcagtgctggcataccgttaacggtagtttttgcccattccggatctgctttaatcgggctggtaatgccgtccatcaccacatcttccggcaggatcaccggcagctggtcgtccggggtcggcattacggtaccgtcttccagcgtcaccatcggaatcggcgcgccccagtaacgctgacgagaaacaccccagtcgcgcaggcggtagttcactttacgctcgccaacgcccatcgcagtcagtttatcggcgatggcgttgaaggccgcttcatggtcaagaccattaaactcgccagagttgaacagcacgcctttttcagtcagggcttgctgagaaagatctggctcagagccgtcagctgccaggataaccggtttgatgttcaggccgtatttagaggcaaactcgtagtcgcgctggtcgtgacccggaactgccataactgcgcccgtgccgtattccatcaatacgaagtttgctgcccaaacgggaatttcttcgcccgttaatgggtgaaccgctttaaagccagtatcgacgccttttttctccatcgtcgccatttcagcttcggcaactttggtgttacggcattcgtcaataaaggcggccagttcaggattattttccgccgctttctgtgccagcggatgacccgcagccaccgccaggtaggtacaacccataaaggtgtccgggcgggtagtgtaaacggtcagcgtgttgtcatagtcgttaacgttgaaggtgatttccacgccttcggaacgaccgatccagttacgctgcattgttttaacggtgtctggccagtgatccagtttatccagatcgttgagcagctcgtcagcgtaagcagtgattttgataaaccactgcgggatctctttacgctcaactttggtatcgcagcgccagcagcagccgtcgataacttgttcgttcgccagtacggtctggtcgttcgggcaccagttgaccgcagaagtcttcttatataccaggccttttttatacagttcggtgaagaatttctgttcccaacggtagtattccggcgtacaggtcgccagctcgcggctccagtcataaccaaagcccagcattttgagctggtttttcatatacgcgatgttgtcgtacgtccacggtgctggcgcggtgttgtttttcaccgccgcgccttccgcaggcagaccaaatgcgtcccagccgattggctgcaggacgtttttgcccagcatgcgctggtagcgggcgatcacgtcaccgatggtgtagttgcgaacgtggcccatgtgtagtcgaccagaaggatagggaagcatagacaggcagtaatacttctctttgctctcgtcttcggttacttcaaatgtgcgcttctcatcccagtgaagctgtactttggattctatctcttccgggcggtattgctcttgcatggcagccagtggtcctgttttcaatacggctacaaatgtagcgttgatgtggtttttcagatccgcatagcatagcccaaacgcccgcgtcaaaacagcctttcgcgcactcgacgttgaaatgatgcccggattattcatacattaatttacagagtttgtgggcgtattagcaaagcaaggaacaaagaacgtctattattatagtcagttaacgacccgggagatgaaacgatgaacaaggttgctcaatattaccgtgaactggtcgcgtcactgagcgaacgcctgcgcaatggcgaacgtgatatcgacgcactggtggaacaggcgcgcgagcgcgtaataaaaacaggggagttaacgcgaaccgaggtcgatgagctgacgcgagctgtcagacgtgacctggaagagttcgccatgagctatgaagagagcctgaaagaagagtctgacagcgtctttatgcgggtgattaaagaaagcttgtggcaggagctggcagacatcaccgataaaacgcagcttgaatggcgcgaagttttccaggacctcaatcatcacggggtttatcacagcggagaagtggtagggctgggaaatctggtctgcgagaaatgtcacttccatctcccgatctatacaccggaagtgctgacgctatgcccgaaatgtggtcatgatcagttccagagacgcccgttcgagccgtaatgaaatgagtggcgccggatggcgtgatgtcatccggcgagtgattaagcgtaaaatttcagacgatcagctagtaaatcaacaaagccctgacgatcaacatcgaccattacggtggcattcggtttattgccagtcagataataataatcaacaactgtcataccctgggtatatttcccttgtgtttccacgccaacccagcgctcaacagtggtaaacaactccggtttcaacagccaggcgatggtgcatgggtcatgcagtggtgcgccgacaaagccccatttttcgtctttgtgatattcgaggaagaaatccagcagttcggcaacaatggttgaaacagggttgccaatcgcgcggaaacgctcagtgtcttcaacgtggatttgtgctttgtgagtaacatccagaccggccatcaccaccggaattcctgactggaagacaatttctgccgcttccgggtcaacgtaaatattaaattcagccgcaggcgtccagttaccaagccccattgcgccgcccataatcacgatacgggcaattttgctatgcagttccgggtggctattgagcagcaaggcaacgttagtttgcggtccggtagaaacaatggtgacaggttcctcactttcacgcagcgttttcgccatcagctccaccgccgtacagttttgcggtgcgaacgtcggttccggtaatgccgggccgtcgagaccgctttcgccgtgcacgttgtccgcaataatcaaattacgcattaacggttttaccgcaccgcttgctaccggaatatcggtgcgattaagcaaggtcagcatacgcagaacattgcgtaaggttttttctggtgtctggtttccggcggaagacgtaattgctttgacatcaagctctggtgaggcgagggcgagaactattgcgatagcgtcgtcatgacctgggtcgcaatctaacagaattggcagtgccattgttgctccttgttgtgtgtttctttgcgacaagggtaacgccgggatgtaacagatacgagggacgaaacgagaaagcgtgagatggcgcgcaattgagtatgcgcgccagagtgattaatgcaggatttttgcgaggaagtcttttgcgcggtccgattttggattatcgaagaaagcgcctttcggcgagtcttcgataattttaccctcgtccataaagatcacccgattcgccactttacgggcaaagcccatttcgtgggtcaccaccatcatcgtcattccttcgttcgccagttcgaccatcacgtccagcacttcgttgatcatctccggatccagcgccgacgttggttcgtcgaacagcatggcaataggatccatgcacaatgcgcgagcgatcgccacacgctgctgctgaccgccggaaagctgcgccggaaacttattggcatgtgcggaaagcccgacgcgctccagcaatttcaatgctttttcacgagccggcgctttattgcgtttaagcactttcacctgcgccagggtcaggttttcgataatcgacagatgggggaacagctcgaaatgctgaaacaccatcccgacgcgggaacgcagtttcgccagatcggttttcttgtcgttaaccacgatgccatcgacggtgatttcaccttgctgcaccggttcgaggccgttgactgttttaatcagcgttgatttaccggaaccagacgggccgcaaaccaccacaacttcgccttttttcacttcggttgagcagtcggtcagcacctgaaagtgaccataccattttgaaacatttttcagggtaatcattatgctgtccttcttttcaagtagctgaccaacaacgacgcgctaaggctaataacgaaataaacaaatccggcaaacaggatcatctcaacctgcgtaccatcacgctcaccaatggttgaggcggtacggaagaaatcggccagagataacacatacaccagtgaggtatcctgaaacagtacgatgccctgagtgagcaacagcggcaccatcgcgcggaacgcctgcggcagaataatcagtttcatcgactgccagtgagtcattcccaacgccagcgcggcgctcgactgaccacgagaaatactttgaataccagcacggataatctctgaatagtaggccgcttcaaacatcgaaaacgccaccatcgccgaaattaaacggatatcatttttgggtgataatcccagcacgttttgcagaaaacccggtacgatcaggtaaaaccacagcaaaaccataactaaaggaatcgagcggaatacgttaacgtaggctttggcaaaccacgctacgggcgcaaagctggacaagcgcatcaccgccagcatggtgccccacaaaataccaatcaccactgccgtgacggtgattttcagcgtgatcaccagcccgtcgagcagatatggcagggaaggaacaatggaactccagtcaaactcgtacattatttgccccccatgttgccgggcaggcgaactttacgttcaaccagcgtcatcaccagcatgataaaagcgttaatcaatacatacgccagcgtgatggcggtaaacaactcccaggcgtgggccgagtaatcgagcaatttacccgcctgcgccgccatatccaccagaccgatagtcgaggcgatggccgagtttttcaccaggttcatcatctcggaggtcatcggcgggacgataacgcgataagcattaggcagcagtacgtagcggtaagcctgcggtagcgtcagacccatcgccagcgcggcatttttttgcccacgcggcagcgactgaatagcggcgcgtacctgttcgcaaacacgggcggcggtaaacagccccaggcagagcatggatgaaaggaaaaattgaatattagggtccagctcggccttaaaccacatgccgattttctctggcagcagctccgggatcaccaggtaccaggtaaagaattgcacaatcaacggcacgttgcggaacagttcgacatacaacgtacccagaccggagagaaaacggtttggaacggtacgtaaaatgccgaaaaatgaaccgacgaggaaagcgataatccaggcgcagatcgacaaagcgatcgtcacctgaaagccactccagatccaaccaagataggtggtgttgccgaacggggcttgttgtaaaaaaataccccagttccagtctatagacataaatctactccagaaaaaagagggtagcagcgttaactgctaccctcgaagattgttacccagcgtattgcggttttctggcccgatggggaacgaccaccaggcgtatagtctgtccgtgctacgtaacaatcgagagggctggaatttccgcccctggttcttgtaattagttcagtgccttgtcattcggttctttgaacagtgctttcatttcgtctgacagttcgaaattcatgttcaggtttttcggcggaattggatttttgaaccacttatcaaaccatttttccgcttcaccggaggtctgcacctgagcgatggtgtcatccatcagctttttgaactgcggatcgtctttacgcaacatgcaaccgtaggcttcctgagactgcggcttgccgacgatttcccagttgtctggtttcttcgctttcgcacgttcaccagccagcagagcatcatccatcataaaggcaacggcacgaccgctttccagggtacggaaagagtcaccgtgatctttggcgctgataattcgcatattcattttttgctcttcattcagtttgttgagcaaaacttcagaggtggtgccggaagtgacgactacggctttgcctttcaggtcggcaaaatctttgatatcgccgccctttttggtcagcaggcgcgtaccgaccacgaaaatagtgtcagagaaagccgcctgtttttggcgttcggcattgttggtggtagaaccgcattcaaaatcgaaagtgccgttttgcagcagtggaatacggttttgtgaggtgatcggaatcaatttcacctgtaagtctggtttgttgagtttctttttcactgcttcaacaatggcgttggagtaatcctgcgagtagcccaccactttttgctgattgtcgtaataagagaaaggtactgaagattcacggtgaccgacgacaatcacgccgtttttggcgattttgtccagcgtgctgcctgctgccggggcggcgtcatctgcctgtgccagtcctgcggaaagcgccagggccaggattgctgtggcaggtttacgtaattgcatatccaactcctttatcttctgcgttaaaaacgcatggatacccgttgtgagtgtttgtgttgttatcatctgcgactttattgtgcagtgttgtgtttgttaggtaacatttagtttggataaatgtaaagatattgctgttttattgtttatttttgcgaggtgcgccgcaccattccgaagcaaaattcttaaaccgcacctttttggtgctaccgctgatttgtggtggtgcaacccgtttgcgttgcggctgatttcattgcttacacagtaaataaagcaacttacatgccaaaaaatacttaggggtgaattaattacgattgtaatttcagtttgaaaaagtcatatttcggacagtgttaacttttcggtgtgggacgtttgccgggatgataactacacacgggaaaatgctttttactagtcttttcaaggaagaatcaccttatgtctgcatcttcggttaagccgttaaatgttcaattacccgcaataaccctgatcctttttgcgctctgtgttgggatattttgttacctcgcacaatggatgagttacgaagaagtcgatcaatccgcactcatccatctcggcgctaacgttgcttctctcacgttgtcggatgaatcctggcgcttattgagcagtgtttttctgcacagtagtttttcccatttgctgatgaatatgtttgcactcctggcggtggggacagtagcggaacggatactggggaaatggcgactcctgattatctggttattctccggcatctttggtgggctgatcagcgcctgttatgcgttacgcgaaagtgagcagatagtcatcagcgttggggcatccggggcaattatgggaatagcgggcgctgcgatagcaacacagcttgcttcaggtgcgggcacacaccataaaaaccagcggcgagtatttcctctgttgggtatggtggcgctgacactgttgtatggtacccggcaaacaggaatagataacgcttgccacattggcggcctgattgcggggggcgcgttgggttggctgagtgcgcgtttagttgggcaaaatcggctcgttacggaaggcgggattgttgttgcggtcactcttcttctgaccgggactatctggtttgtgcagcagcagattgatgaatcagttttacaggtcaggcaaagcctgcgtgaagcgttttatccgcaggagattgaacaagagcgacgacaaaaaaagcagcagttagtggaggagcgcaacgccctcagggaaacattatccgctccggtaagtcgtgagcaggccagtggtgatttactcgctgagattgccgatatccatgatatggcgatcagtcgggatggtaatacgttgtatgccgcaattgaaaacacgaacagcattgttgttttcgacctcggacaaaagaaaatcctgcatacctttacagcgcccatagcgaaagaaaagtcagtcaaacattgtggtggctgtaaagatcagggcgtcagatcgctggcattaagcctggatgaaaagttgatttatgcgacttcatttgaagcgaatgcgttatcggtcattaacgtggcgacgggggagattattcagtcgattaccaccggcgcacatcctgacagctttatcctctcgcgtgatggcacaaaagcctgggtgatgaatcgcaccagtaatagtgtgtcagcgattgatctggtggcttatcagcatgtggcggatatcccgctggagaaatacgacgggacggggatgagcggtaaaccaggcgcctgggttatggcactttccccggatgaaaaaacattactggttccgggagcaggcagaggtaacatcgtgcggatcaataccatcacgcatcagaaagaagactttcccgcaggtaatgcgcgtggtgtcgtttctgcgatgggattccgaccaaaaaatggtgagattatttttgccgatagccaggggatttcacgtataagagctgaggatcaacaagccagcattatgacgcaatggtgtagcaggagcgtttattccgttgagggtattagcccggacggtcagtatttagcgttggtgtcatatggcctgcaaggttatgtcatcctgctcaatattaatgccgggcagattattggcgtttatcctgccagctacgttaataatcttcgtttttcagcggatggtagaaagatatttgttatggcgaagaacgggctaatacaattggacagagaaagttcacttgatccgcaggcaattattcgtcatccccaatatggcgatgtggcttgtatccctgaaccgtaagaaaaaagggcatgataatcatgccccacaactcaatgagaaagtatgttttgttcatgccggatacatcaggcacattaatgtttacgtgctcgcagactcatcagtacagcggcaaaaccaaacagcgccgtcagcacccacagcggccagttgccggttcgtgcgtacggtgtgagtccggtggttggtgtcacgttagtggtcaacacctcgcgggtgaactgcgggatcatcgcctgaatctcaccctgcgggccaatcaccgccgtaatgccgttgttggtgctgcgcaacagtgggcgcgccagctccagcgcacgcattcgcgccatctggaagtgctgccatggaccaatagacttaccaaaccacgcatcgttggagatagtcagcagatagtcggtatccgggcggaagttatcgcgcacttgctcgccgagaatgatttcgtagcaaatggccgcagtaagttgaatgccattcaacgacagcggtggctgaatatatggtccgcggctgaatgaagacatcggcaaatcaaagaacggtgctaacggacgcagtatcgactccagtgggacaaactcgccaaacggcaccagatggtttttgttatagcgatcggctgattcatagctgtacggtgcgcctttacccagtgtgatgatggtgttgtaggtatcgtagcggttctgtttattgagacgcgcgtcgacaatcccggtgaccagcgagctacctttatcgcgcaactcaccgtccagagctttgaggaacggttgctgattaatttccagatcggttatcgccgactccggccagataatcaacgatgatttgcccatcagcggtgccgttgcgttgtagtaaatcttcagcgtattaagtagctggtctccgtcccatttcagcgattgcggaatatcgccctgaaccatcgaaacctgaatagttttttccggttgcggggtaaaccactggatgtaacgcagcgggaagggaagggcaaacagcacgacggccaccaccagcggacgccagttgcgtttgaccaacgccagtgccagcaggccgctaaccatcatcagcaggaagttaatggcttccacgcccattatcggtgccagcccttttaacgggccatcaatctggctatagccgaactgtaaccacgggaagcctgttagtacccaaccgcgcagaaactcggtcacttgccagagagcaggggcggcaatcgccacgcgcagccaggtggttttcggccacagacgcgacagcacgccagcaaacagtccggtatacagcgacaaatacgccgccagcagtaccaccaggaagatgttaaccgggccaggcattccgccaaaggtcgcgatgctgacatagacccagttaataccgctgccaaagaggccaaatccccagcaaaagccaatagcggcagactggagtggacggcggttaaaggtcaacgcctgaagccccatcagcgaaataatcgccgcaggccagacgtcgtaaggagagaaggccagcgttccgcaggcaccgaataataacgccagcagcaggcgaatgcgctggcgttcaattaatgaggcaaaagccatgtagttatctatccagtttcggttttattcatccagcttcggctggggtgagtcatccgggattttgacatgaacctgaataatacgccgactgtcggccatcgccactttgaactggtaaccgtcgatgtcgatggtttcgccacgcgccggaagatgcccaaatgcctgcatcaccagaccaccgatagtgtcaacctcttcatcgctaaagtgggtgccgaacgcttcgttgaagtcttcaatagaagccagtgcgcgcacggtccaggtatgacgactcagctgacggaagtcgatatcatcttcttcgtcatactcgtcttcaatctcaccaacaatcagttccaggatgtcttcaatggtcaccagaccggaaaccccaccgaattcgtcaatgacgatcgccatgtggtaacgctgagagcgaaactctttcagcatccggtctacgcgcttactttcaggaacgacaaccgcctgacgtaacactttgtccatgctgaaggcttcagcatcgctgcgcataaacggcagcaagtctttcgccatcagaatcccttcaatgtgatctttgtcttcgctaatcaccgggaaacgtgagtgggcggactcaatgatgacatcaaggcattcgtccagcgtctggttgcgtttcagggtaatcatctgggagcgggggatcatgatgtcgcgaacgcgttggtctgcgatgtccatcaccccttcgagcatatcgcgcgtatcttcgtcgataaggtcgttctgcccggaatcacggatcagcgccagcagttcgtcacggtttttcggttcaccgtggaaaagttggctgagtaacagggagaaaaatcccttcttgttgcttatcgtgtcactactgtgtgaattgtcgtcgctcatggcgtcgtatgggttctcatgttagttaatcaaaacgccgtcgttaatcaccaacggcggggacgtctgccagtcaaatgcctggcaaattattctttctcggcaatgtacggatcctcatagcccagagcaagcataatctctgtttcgatggcttccatttcttctgcttcgtcatcttcgatgtgatcgtaacctaacaaatgcagactgccgtgcaccaccatatgcgcccagtgcgcctccagtggtttgccttgctcctgagcttccttctcaaccacctgacggcagataaccagatcgcccagtagcgacatttccatgccaggcggtacttcaaacgggaaggagagcacgttggtcggcttatccttaccgcgataggtcagattcagactgtggctttcggcggtatcgaccacgcgaatagtcacttccgattcttcctgaaactgcgggatcaccgcattcagccatgtctgaaactggctctcttccggtaacccggaattatcttcacatgccagttgtaaatcgaggatcacctgactcatttttgttcctgttcttcgcgcttgcgttctgctgccagcgccgctttacgtttttgttcggcttcttcccaggcttcataggcgttaacgatacgcgccaccaccgggtgacgaaccacgtcttcgctgtggaagaagttaaagctgatctcttcgacatcagccagcacttcgatggcatgacgcaaaccagacttggtattacgcggcaggtcgatctgtgtgacgtcgccggtgataaccgcttttgagttaaaaccgatacgggtcaggaacatcttcatctgttcgatggtggtgttctggctttcatcaagaatgataaacgcgtcgttcagcgtacgaccacgcatataggccagcggtgcgacttcaataacgttgcgctcaatcagtttctcgactttctcaaagcccagcatttcaaacagcgcgtcgtacagcgggcgcagatacgggtctactttctggcttaaatcgccaggcaggaagcccagtttctcaccggcttcgaccgccggacgagtcagcagaatacggcgaatttcctgacgctccagggcatcaactgccgcagccactgccaggtaggttttacccgtacccgccgggccaacgccgaaggtaatgtcatggtcgagaatattggcgatgtactgcgcctggtttggcgtgcgcggcttaattacgccgcgtttggtcttgatattgaccgctttgccgtactccggcacgctctccgcgctttgctccagtacccgcgcttctttaatcgcaaggtggatctgttccggttcgatatcctgaatctgaccacgcatcggggcagtatcgacatacaggctacgcagaatgtctgccgcagcggtgacgcaaatcggacggccggtcagtttaaagtggttatcgcggcgattgatctcgatgccgagacggcgttcgagctgcttgatgttgtcatcaaacgggccgcacaggctcaacagacgcgcattgtctgctggctccagggtgatttcgcgagtgtctatgttcaaaccgttcctcttatctgtatgccgccggaagctgaacattcaccggcctataaggaaattattcacgccacaggaaaaaggcgcaagcattgcgataaagatggggataaagagagaaaaaacaaggcccaccggaacggcgggcctgagaattacggctgataataacccacgccaaggtcgttttctttgcgggtacgggcaatcaccgattccggtgtttctgccacgcgcagacccatttcatcttcagttcgcaccactttaccgcgcagagagttcgggtagacgtcggtaatttctacatcgacgaatttaccgatcatatccggtgtgccctcgaagttaaccacgcggttattttcagtgcgaccggaaagctccatgatgctcttacgtgaagtcccttctaccagaatgcgctgggtggtgccgagcatccggcggctccatgccatcgcttgctgattaatgcgctcttgcagaatatacagacgctgcttcttctcttcttccggaacatcatcaaccatatcggcggctggtgtacccggacgtgcagagaagataaagctgtagctcatgtcgaaattgacgtcggcaatcagcttcatcgttttctcgaagtcttcggtggtttcgccagggaagccgacgatgaagtcagagctgatctgaataaccgggcgcgccgcacgcagtttacggatgatcgctttgtactccagcgccgtatgggtacgtcccatcaggttcagaatgcgatcggaaccgctctgtaccggcagatgcaggaagctcaccagctccggcgtgtcgcggtacacttcgatgatatcgtcggtgaattcgatcggatggctggtggtaaagcgaatacgatcgatcccgtcgatcgccgcaaccagacgcagcagatcggcaaacgatccggtggtgccgtcgtagttctcaccgcgccaggcgttcacgttctggccgagcaggttaacttcacgcacgccctgagccgcaagctgggcaatctcaaacagaatatcgtcggacggacggcttacctcttcaccacgggtgtaaggcactacgcagtaggtgcaatatttattgcagccttccatgatggagacaaacgcggtcggcccttcggcgcgcggttccggcagacggtcaaacttctcgatttccgggaagctgatatctacaaccgggctgcggtcgccgcgcacggagttgatcatctccggcaggcggtgcagcgtttgcggcccaaaaataatatcgacatagtgggcgcgctggcgaatgtgctcgccttcttgcgatgccacgcagccgccgacgccgataatcaggtctggattcttctcttttaacagtttccagcgacccaactgatggaagactttttcctgagccttctcgcggattgagcaggtgttcagcagcagcacatccgcttcttccgccacgtcggtcagttgatagccgtgggtggcatccagcagatcggccatcttcgatgaatcgtactcgttcatctgacagccccaggttttaatatggagttttttggtcatcgacttgctcttgcgaaatagtagccaggaatgcagggcgcatagtgtaatgctttgctgccgttgtgaccagtatgagcgttatcagcccttgggggtaaaaatcctgtaaacttaaagcatattgctaacaggattattgaccatgacaaatcaaccaacggaaattgccattgtcggcggaggaatggtcggcggcgcactggcgctgggactggcacagcacgggtttacggtaacggttattgaacatgcccagcctgcgccgtttgttgcggacagccagccggacgtgcggatctcggcgatcagcgcggcttcggtatcattgcttaaaggggtaggggcctgggatgcagtacaggctatgcgttgccatccttaccgcagactggaaacgtgggagtgggaaacggcgcatgtcgtgtttgacgccgctgaacttaagctaccgttgcttggctacatggtggaaaacactgtcctgcaacaggcgttgtggcaggcgctggaagcgcatccgaaagtaacgttacgtgtgccaggctcgctgattgcactgcatcgccataatgatcttcaggagctggaactgaagggcggtgaaacgatcctcgcgaagctggtgattggtgccgacggcgcaaattcgcaggtgcgacagatggcgggaattggcgttcatgcctggcagtatgcgcagtcgtgtatgttaattagcgtacagtgtgagaacgatcccggcgacagcacctggcagcaatttaccccggacggaccgcgtgcgtttctgccgttgtttgataactgggcatcgctggtgtggtatgactctccggcgcgcattcgccagttgcagaatatgaatatggcgcagctacaggcggaaatcgtgaagcatttcccgtcgcgtcttgggtatgtaataccgcttgccgctggcgcgtttccgctgatacgtcgccatgcgttgcagtatgtgcagccggggcttgcgctggtgggcgatgccgcgcataccatccatccgctggcggggcagggggtgaatcttggttatcgtgatgtcgatgccctgattgacgttctggtgaacgcccgcagctacggcgaagcgtgggccagttatcctgtgctcaagcgttaccagatgcggcgtatggcggataacttcatgatgcaaagtggtatggatctgttttatgccggattcagcaataatctgccaccgctgcgttttgtgcgtaatcttggtttgatggcggcggagcgtgctggcgtgttgaaacgtcaggcgctgaaatatgcgttagggttgtagcctcacaacattgctggatgcatgccaaccgtaggtcggataagacgcggcagcgtcgcatccgactttgaaggataagacgagtcaacatcgcattcggcattgaatatacgcagaaaagcaaaaagctcgccgaagcgagcttttttaatgtggctggggtacgaggattcgaacctcggaatgccggaatcagaatccggtgccttaccgcttggcgataccccaactgggtgcacttacaaggtaagcgtcttgaataaattggctggggtacgaggattcgaacctcggaatgccggaatcagaatccggtgccttaccgcttggcgataccccaacaaattggtttttgaatttgccgaacatattcgacacattcagaatttggtggctacgacgggattcgaacctgtgaccccatcattatgagtgatgtgctctaaccaactgagctacgtagccagattgtttcttcgatggctggggtacctggattcgaaccagggaatgccggtatcaaaaaccggtgccttaccgcttggcgataccccaataaccgggcggtgaaccgcttattcgaagaatatggctggggtacctggattcgaaccagggaatgccggtatcaaaaaccggtgccttaccgcttggcgataccccatccgtacaacgctttctggtgaatggtgcgggaggcgagacttgaactcgcacaccttgcggcgccagaacctaaatctggtgcgtctaccaatttcgccactcccgcaaaaaaaagatggtggctacgacgggattcgaacctgtgaccccatcattatgagtgatgtgctctaaccaactgagctacgtagccatcttttttttcgcgataccttatcggcgttgcggggcgcattatgcgtatagagccttgcagcgtcaacctctttttcaaggaaaattgctcgaaagtgactgtttggttaggttgcgaacagcatggcgctatattcgtcaattattgtttactttgtgttttttccccaccctacagccattcttttgtcatacaggatgaaattcggaattcaacaatagtggtgggaaattaatctatgaaatactggcctacagtaatgagttgtcaaacatcgatgtggcaaacccggaacatttccttactgcatatcagaatcaacaagcgccccagtaactgaaattgccccggatttctccggggcaatattacacgtcttatttatatgccgactggtgaacgccaaccgcgcgaccagacggatcgtccattttcttgaacgcttcatcccactcaatcgctttagcggaagaacaagcgacggaaggaccgcccggcacgcactcagcggcgctcggaagcgggaacaattcttcaaagatctcccggtacagatacgcttcttttgaggtcggcgtgttgaacgggaagcggaagcgggcagtttccagctgttgatcagaaacctgctgcgctgccacttctttcagggtgtcgatccaactgtaaccgacgccatcggagaactgctctttttgccgccaggccacgcttgcaggcagatacgcttcaaaacattcacgcaggatgtgtttttccattttgccgttaccgcacattttatcctgtgggttaatgcgcatcgccacatcaaggaattttttgtcgaggaacggaacgcgtgcttccacgccccaggctgacatcgctttgttggcacgcgcgcagtcatacatatgcagggccagcagtttacgcaccgtctcttcatgcaactctttagcgttcggcgctttgtggaagtatagataaccgccaaacacttcgtcagaaccttcaccggacagcaccattttaatgcccatcgccttgatcttacgcgacattaaatacatcggtgttgaagcgcgaatagtggtcacatcataagtttcgatgtggtaaatcacgtcgcggatggcatccagaccttcctgtacagtgaagtgaatttcgtgatgcaccgtgcccagatggtttgccacttcctgggctgctttcagatccggtgagcccggcagacctacagcaaaggagtgcaactgcggccaccaggcttcagagcgttcctgatcttccacgcgacgggcggcgtatttcttggtgatagcggaaataattgaggaatccagaccaccagaaagcagcacaccgtaaggcacatcagacatcagatggcttttaacggaatcttccagtgcctgacgcagctcgtttttgtcggtcacgttatctttcaccgcatcgtagtcgaaccagtcgcgatgataataagaacggatttcgccgtcctgactccacaaatagctccccgccggaaactctttaatcgtgcggcaaactggcacgagggctttcatttctgaggccacatacagctgaccgtgttcgtcatagcccatatacagtgggatgatccccagatggtcgcgaccaatcagatatgcatctttttcgctgtcgtacagggcaaaggcaaacatgccctgcaagtcgtcgagaaattccggccctttttcctgatacagcgcgaggatcacttcacagtcagacccggtctggaactggtaacgatcgccatattcagcgcgcaatgcctggtggttgtagatttcaccgtttactgccagcacatgagttttttgttggttgtagagaggttgcgcccccgcgttaacgtcaacaattgacagacgttcgtgggcgagaatggcgttatcgctggcataaataccggaccagtccgggccacgatgacgcatcaggcgtgacagctcgagtgctttcttacgcagctcaactgcgtctgttttgatatcgaatacgccaaaaatagaacacataaccttctccgttaacctggtgtttactgcgtgttgtgtttgcttgttaaaaaaatgccgcaaagcagcacggtgcgcaagcgatttggcagtggaaaaataaaaaacgtaatggcgattgctgattgatgaaaaaggggagggcttttgggtatatttattgatggatcgataatttttgacgggttttattgaatggggtgattttaatgatgggtaaaaataagaaaccacgccctgaggcgtggttgctattcagataacgtcgatttcagcgaccgatgggtaaatccaacttgggcggaacggcatactgtcgatatcgtcgagtgacgaaacaccagaaagcaccagaatcgtctccagaccggcctggaagcccgccagaatatcggtacgcaagttatcgccgacaatcaccgtttcttccgaatgcgcctgcattttgtttaatgccgcgcggattatccacggactcggcttaccaacatagaacggtttacgtccggagattttctcgatccccgcacacagcgcgccacaggccggataaaaaccgcgcccgtgggtatccgggttggtggcgataaagcgtgcaccgttagcgacgaaataggctgctttatgcatcatgtcccagttgtaggaacgcgtttcgccaacaatcacaaaatcagggttcacatcggtaatagtgaaaccggctttgtacagttcatgaatcagtgcgccttcgcccaccacatacgctttcttgccttcctggcgacgcaggaaatcggcggtcgccatcgcggaggtataaaacacgctatccggtacatcgacaccggcagtggcaaagcgattcgccagatcttgcccggtctgcgaaggatagttggtcagcaacaccagcggcaggcctttatccataatcccgtgcaaaaattccgctgcacccggtacggcgacgttatcgtgcatcagcacgccgtcgatatcgcaaattacatttttaatggtcatggactacccagaatattgacaacaataagcgccactataaaagcacattaattttccagcaaatgctggagcaaaataccgttgagcatggcgcgttttaccagcgcaaaagcgccgattgccgagcggtgatccaactcagaacgtaccaccggtagattagtacgaaacgccttcagcgcctgggtattaatgcagctttcaatagcagggagcagcactttatcggcttcggtgatttctccagcaataacaattttttgcggattaaataagttgatagcaatggcgatggttttacccagatgacgaccgacatattcaatcacttccgaggccaggctatcgcctttgttcgcggctttgcagatagttttgatggtgcagtcgtccagaggcacacggctctggtagccctgctttaacagattcaacacccgttgttcaatggcagcattggcggcgatagtttccaggcagccaaagttgccgcagtggcagcgttcacccagcggttcgacctgaatatggccaatttcaccgacgttgccgttgcgcccgataaaaattcgcccgttagagataatcccggccccggttccgcgatggacacgcaccagaatggagtcttcgcaatcctgacttgcaccgaagtagtgctctgccagcgccagactgcggatatcgtggccgacaaaacaggtcactttaaaacgctcttccagtgcttcaaccagcccccagttttctacctgaatatgcggcatgtaatgaattttgccgctgtccgggtctacaagccctggcaggatcaccgaaatcgcgatcagctcgcgtagcttgcgctggtagctatcaataaactgagcaatggcattcagcagggcatgttccagcgtctgctgggtacgttccgggagcgggtaatgttcttctgccagcactttgctgctgagatcaaacaaggtgatggtggcgtcgtgacgaccaagccgtacgccgattgcgtggaaattgcgggtttcggtgacgatggagatagcgcggcggcccccggtggaggcctgctgatcaacttctttgatcagcccgcgttcgataagctgacgcgtaattttggttacgctggcgggggcaagctgactttgctcggcaatctgaatccgcgagattggcccgtactggtcaatcaggcgataaactgccgcgctgttaagctgttttacgagatcaacattacctatctgagcttgtccgcctggtgtcatactttctcttattgagttacgacctcgttaccgttaacgatggtcctggtgattttaaaatcaggtgtgaatgcagtcaggttggctactttacctgcggcgagcgtgccgagacgtttctctacgccaatcgcacgtgccggatagagcgtcgccatacgcagcacttcatccagtgcgataccacaatgttcgaccagattacgcacgccttcaatcatggttaaggatgaaccgcttaacgtaccgttctcatccacacaaagtccgttacggtagtatattgttttacccgcaaaaatgaactgttcaatgttggcacctgctggcgcggtggcatcggtaaccagacacaatttgtcgcctttcagacgtttagcgttacgaatgttggcgtaatcaacatgcaggccatcagcaataataccgcaataaatgtcagcttcgtcgaggatcgcgcccgccaggcccggttcacgaccggtaatatacggcatcgcgttgtacagatgggtggcaaaggtaatccccgcgcggaaaccggctttcgcttctttcaacgtcgcgttggagtgaccagcagaaaccacaatcccggcatttgccagtttgctgatgacttccgctggaaccatttccggtgccagagtcactttggtaatcacgtcggcgttctcacacaggaaatcgaccagcgcggcatcaggcttacgcacaaaattcggattatgggtgcctttttttaccagattcagccacggaccttccagatgcagacctaacgcctggttcggatgttttgccaggtactcgcgcataacgcgcacgccctgtttcatcagctcatcgctggtggtgataagcgtcggcagatagttagtacagcctgatttctcattggctttctgcatgatttccagcgtttccacgctgaccgcttcagcggtgtcgttaaactgtacgccgccgcagccgtttaactgcacatcgataaaaccgggggagagaatggccccgttcagtgaacgttgttcgatctctggcggcagttccgctaccggacagacgcttttaatcaggccatcagcgataacaaccgcgtggtcatcaagaaattcgtggccggtaaagatccggccctgggttaatgcatacattctgacccccgattttaaaaaataatgccctgagcaaggagccagggcagggataacaattacagacccttgatattttctgcttctaattcattgaaatatcttaaagtcttaactttcagctccatggtggaaggttcatcgcacaccatgatcgcttttggatgcagttgcagacaactgatggtccacatgtggttcacgcaaccttcaacggcggcctgcagtgccagtgctttctgactacccagcaccagaatcatcacttcttcggcatccagcaatgtaccaacaccgacagtcagggcatattttggcacctgattaacatcgttatcaaagaaacgagagttcgcgacgcgagtgtcatgagtcagggttttgatacgagtacgagaagccagagaagacgccggttcgttaaatgcaatatgaccgtcgttacctacaccgcccataaacagatgaatttttccgtaagaacggattttttcttcatactggcggcattcggcttcgatatccggggcgttgccgttgagaaggttgatattttctgctggaatatcaacgtgatcgaagaaattacggtgcataaagctgtagtagctttccggatgctctttcggcagaccgacatattcgtccatgttgaaggtgacaacgtgcttaaagctgacctggcctgctttatgcatttcgactaacgctttataggtggtcatcggcgtgccgccagtcggcaggcccagtacaaacggacgatcggcagtcggtttgaacgcattgatacgattgacgatatggcgagcagcccatttgccgacctgttcagcggtagtcagggggatcagtctcattattcacctcaataagtaaaatgtaagccgttggcggattaggcatctttaagcgtaacctggatttgcgcagacaggcgtcaatccgacctgattttttgaatgataaaataagttttctggtttagccagtaaaagggagtgatgataacgatatttggtgacaaaactcacaaaagacacgcgtttaatttgcgatacgaattaaattttcacacactctgtagcagatgatctaacaatctgattacagaacatcggcagtacaatttgcagcaaaataaaaatacggctttaaacgagccaaatagggttctcgtagggggaataagatgaatattttaggttttttccagcgactcggtagggcgttacagctccctatcgcggtgctgccggtggcggcgctgttgctgcgattcggtcagccagatttacttaacgttgcgtttattgcccaggcgggcggtgcgatttttgataacctcgcattaatcttcgccatcggcgtggcatccagctggtcgaaagacagcgcaggtgcggcggcactggcgggtgcggtaggttactttgtgttaaccaaagcgatggtgaccatcaacccagaaattaacatgggtgtactggcgggtatcattaccggtctggttggtggcgcagcctataaccgttggtccgatattaaactgccggacttcctgagcttcttcggcggcaaacgctttgtgccgatcgccaccggcttcttctgtctggtgctggcggccatttttggttacgtctggccgccggtacagcacgctatccatgcaggcggcgagtggatcgtttctgcgggcgcgctgggttccggtatctttggtttcatcaaccgtctgctgatcccaaccggtctgcatcaggtgctgaacaccatcgcctggttccagattggtgaattcaccaacgcggcgggaacggttttccacggtgatatcaaccgcttctatgccggtgacggcaccgcggggatgttcatgtccggcttcttcccgattatgatgttcggtctgccgggtgctgcgctggcgatgtacttcgcagcaccgaaagagcgtcgtccgatggttggcgggatgctgctttctgttgctgttactgcgttcctgaccggtgtgactgagccgctggaattcctgttcatgttccttgcaccgctgctgtacctcctgcacgcactgctgaccggtatcagcctgtttgtggcaacgttgctgggtatccatgccggcttctctttctctgcgggggctatcgactacgcgttgatgtataatctgccggccgccagccagaacgtctggatgctgctggtgatgggggttgtcttcttcgctatctacttcgtggtgttcagtttggttatccgcatgttcaacctgaaaacgccgggtcgtgaagataaagaagacgagatcgttactgaagaggctaacagcaatactgaagaaggtctcaatcaactggcaaccaactatattgctgcggttggcggtactgacaacctgaaagccattgacgcctgtattactcgtctgcgccttaccgtggttgactcagctcgcgtcaacgatgcgatgtgtaaacgtctgggtgcttctggggtagtgaaactgaacaaacagactattcaggtgattgttggcgcgaaagcagaatccatcggcgatgcgatgaagaaagtcgttgcccgtggtccggtagccgctgcgtcagctgaagcaactccggcaactgccgctcctgtagcaaaaccgcaggctgtaccaaacgcggtatctatcgcggagctggtatcgccgattaccggggatgttgtggcactggatcaggttcctgacgaagcattcgccagcaaagcggtgggtgacggtgtggcggtgaaaccgacagataaaatcgtcgtatcaccagccgcaggaacaatcgtgaaaatcttcaacaccaaccacgcattctgtctggaaaccgaaaaaggcgcggagatcgtcgtccatatgggtatcgacaccgtagcgctggaaggtaaaggctttaaacgtctggtggaagagggcgcgcaggtaagcgcagggcaaccgattctggaaatggatctggattacctgaacgctaacgctcgctcgatgattagcccggtggtttgcagcaatatcgacgatttcagcggccttatcattaaagctcagggccatgttgtggcgggtcaaacaccgctgtatgaaatcaaaaagtaatctgctttatgtctgatgcgacgcggcagcgtcgcatccaacaataaaaagcggcagggatcttctctgccgctttttttgtctgagattacattgggaagataaaaacagcgcctgcacaaagcgccagaatgcggatgagatacattggtacagagaacacccagaattcgggaagtttgtatttccccattccgaggatcatggctggcattccgtcaataggcatatagccgccattccagccagaaatcaccaccgcaatcgcggcagcggtcgggttaagcccaaggctagtacaggcggcaatggcgatgggggcaaaaatatatactgaccccatattcgaacccgtgaaggtggcgcaggtactggtaagcaaagcaaaggcgacaataaatacaaacggtgagacgccagaaccgagcacacctgcaacggcatcgccaaccatcgccgtaaagccggtgcccgccagtgcatcagctacaccgatcacccccgccatcattaaaatgaccggagcccccatatgatcgcgaacttctttgaagtccagtacatcgatcatcagaacaaacgcacccgcaagacccggaataacgaaggcgatatttcccagaatgttcattagcatcatgccgataacgctgacagcgaatgcggcaatagtgcaatattctttccaggcaggaagggcgttaaacgtttcctcgcgtgccgccagcgcatcctcggaagcatccgcaatgggatgatccggaagaaaacggtaggcaataagactccatgcgaggaaagccgctgacatgatgagattcaccagcgcaaagcgccccatcgaaatctcttgatgaaaccccgcggtttcgagtacggtcgccgtaacgccaaagagaagcgcgagattgataggaagaagcgggtggttggtggcaaatcccaggggcatcattaatttcgatgttggtagctttttactgtacggaatggtggataccagcgacagaattagcacgtaataaccggtcgctccggtgccggcaagactggcacccagcataacaatgactaacaacagcccatagctgcggtaactgcctttattgaccaggcttatcatcgcagatttaacgttgctgataagccgggttttttgtagcgccgccatgaccaccataaaccctgcaatcatcaccacgcttggattgacgaatccggcaaaagcctgttgaacggtcgaaagtcccgatacaaccagcaataaacacgcaagcagtggcggtgcgccaaaaggcattttgtccgacatgatcagcacgatcatcaggaccagtattcctaatgccaggatcatttccattgtcattttttctctccttttaggcttccagcatgtcgcgcggtactttaaagaccgctttgcgtattgaagtagccgtgccaattgcgcacagcgcctggtgaggttcctcaggcataaagacggcgaaatcaccggcgtgtagggtgatggcgacactgttttcaggggatggggcgataaacagatcgggcttacgttcttcatcgttttcgcgagcgatgggccgcgttcccgcattaatgccctcacaaccagtaatcaccacctgtatatcggcccatagatggtgatactccgtatggcggagttcggcgggttgcgtgtctgaagttcccagcgtgcagaaccaccgacatccttcaggttgccagcgaccgtcctctctggtggataacgccgataacgaacactccgggcgcagcagaatatttctcacccaggcaggaagccccgccagcgacaaatggttgagattaccgataatcatgatgcctgccccttaacccactcgggggagatgcgtacgtacttgatggcctgacgccaccaggtgtaagcgatatgtagcgtaccgtccgggctttgtttgatgctggggtaggagaactcacgatttagcttttccagggaattgttggtcatgcagtagccgtcgccttcatcgagattgcgccgccacggccagcttttcccaccatcggcagaaatcgctaccgtcatcggcgcgcgtggggccccccagaaagcggagcgtccgacggctgtcggttctttgcggctgtcgtcgccatcgtcgatttcgtcataaagcgacgcgcgacgttctactgcgcctgccgcactcatcgcgttgtacaccagcgccagttcgccgctggcaagtgtcgttacctgaatagacgaattgttgttgggcaattcggttgcttgcggtactgaccagctctcgccgttgtccgcggaatggctgatatagatgttgtctgcccaacggctgcgaaagagagcaaccaacgtaccgttgtgcagcattgtgatattcatatgaacacagccaagactttgcggcacctcgacatcgcgccaggagtgaccaccgtcagcggaaattttcactgcgctgatatcatcattgccgacccatttttcgccgggttgggtacggcaataaaagacgggcagcagccagttgccgttatcaagcaccgtgattggctgtcgaatgaacgtaccgggtttatcaagcagggtggcaatctcgccccaggtttgtccgaggtcgtctgacttacggtagcggacgatggcggtgtcctgattaccggatatttgtgcggtccataggagccacagcacgttatccggcgcgagaaacagcaccgggttttgctctgaacgcgtgtcatcgtgggaaagtttgaccgcatcgctccactgcattccgccagcgggcaatcgcgatccccagacagaaatatcggcaataccttcctgcgttcccgcaaaccagacgcacattaacgcgccatccggcaaaggcagaatattcgccgcgtggttttgcgggcaggacgagggcagcatggcggtaagcacatgcgaatcgttttcggatggacggatgacgccgtcacgaataagggctacagacatagttagactccatcttaaagttggtaatagatttattaatgcgagtgcgattcatgcgtttcgagcaatgtcgaaacttttttattttttctttcacggataatattgagtgtctcaacacttaatgagaaaaatatcgcgaagtagagatactctttggcaatatgaatgttgagactatcggcaaccagcaatacaccgacaaacaataaaaaggttaacgccagtatttttattgacggcgtggcgttaacgaaatcaccaattgttttcgccgcaaacatcatgacaccgacggcaatcattacggcggcaatcatgataaatatatgctgagaaaggccgacggcggtgatcaccgaatccaggctaaacacgatatcgagcagcattatctgtacaatggcaccgcacaacgacagttgccgcgatccgctgccatgttcgtcttcctgcgcgggcgacagctcttcgcgtatctcctgtatcgctttataaatcaggaacagcccgcccccgagcagaatcaaggtgcggaacgaaatctccagcgtcagcacggtaaaaagcggctgggtaatatgtgaaagccacgcaatggatatcagcaataatatccgcataatcatcgcgcagcttaaacccagtttacgcgccatattttgttgtgataacggaagttttgccaccaccagtgaaagaaaaataatattatccaccccaagaataatttccagaaaggtgagggtaattaaagtgagccagatatctggctgcataaaccacaaaaacatggggtaatcctttattctctttatctaaactttatagcgggctggataatagagttaatttaattaatgttataatgacgaataatttgttgaatctcgctgatctgttcaggcgtgaaattaaccgcgtagcggctatcaccaacatcatgccccataagctgcaacgcttttttcaccgcagccggggagaatgctactttataaagatcggtacgcaggcccgttacactctcctgtgcttcataagacccttcaatatcaccggcatggaagcgagaccagatggcattgatttctcgcggcgcgatgttggcgagcccagagatacaggttgaacatccctcgacaaaccctttatggatcagcgaatccgggccgttgagcacattaaagccgtcaatgtcgcgcaccgcatcgagaaaacccttcaggctttcgtcgcttccggcgctgtctttaatcccaatgatattggggtgcgacgccagagcacgcgcggtttctggctggatcgtattgccagtgcgggccgggatgttatagagaaacatcggaatgctcagtgcgtcggcaattgcgctgtaatgcgcaatcaactcttcctgtttcagcggtacgaagtaaggggcaatgaccgacacggcatctacgccaagtttttcaatctgctgacccagacgaatcgtttcgcgcgtagagatctcgccaatgtgtgccacgaccggcgcacgaccagccacttcatccacgcaggtttgcgtaacgctgagcttctcctgttcattcaacacaaaaaactcgccgttggtgccgccgcaaaaaatcgcgttacccgcttccagttgacgattcacctgcacttttaacgccgggatattcagactgccggtcgcggtaaacggggtgacaatggcggttaatacaccttcaatggttttcggcatgatttactccttaaatggatgttgcggaaacagtgtttggtaaatggcctgtacgtcctgtagatcaatttggcacggcacattgttcataaggcgcttcacgttcagtgccgcctcgctcagagaggcaatatcctctggcggtacgccgagagccgcgagattgttgggtagcttgagttgattgactaatgcctgtaaccaggtcaccagggcatgagatttttcttccgcgctcagggcggtttccgcatcgggaatgcaatcccagacccgggcaaatttctcgaccgcccaggggcgaacaaacgccatgcacggcgccagcaagatggcattcgcgacgccatgcggcagatgatatttgccacctaacgggtaggagagcgcatgaacgagatgcgtgcccgcatgggttatcgctacgccgccatagtaagacgcccacagcatttccagttttgcgcgcagatcctgaggatcgttcacggcgggttgaatgtgccggaaaagtttacttaacccagtcagcgccgcgttatcgctgaccggatttgccacggtcgcggtaaaacactccagtaagtggcaaagagcatcaatgcccgtggacgccgcaatatgcgcgggcatgctggtggtcagttccgggaaaagcgccacatagtctggtaacagcacctgggaaataatacccaccttcgtgctttgctcagggattgccagaatcgcattcggcgtggcttctgagccggttccggcggttgtaggaatcaaccatgattgcacccgctgagtcggtttttcacccgcaagcagcgcatccagccccggtgattgtggatggcaaagcaccgatagcagcttcgccacatccaacacgctgccaccgccgatcccgaccaccacatcaaaagaggcatcgccaggggcatccattagctggcgcacatcatgatgcgtgggctctgcgggcacattatcgataacgttaacctgcgggcagtgcttttccagtaaggcgcgaatctgctgcacaccgtcgagctgcgcaatattacggtcagtgaccagcagcatttttctgatgtcgggtaagagcgacgtcagggaagggatagcgcctgcgccgctcagtatcgtgctattgataattaccacaaataacctctcttctgttgattgaattcaatcattcaaaatgccgtagcctacgtaatatggtctaattttataatttattcgagtgattaataacttgagcttgctcacatttaatcaattgtgattgaatataatcattgttatcataaaacaacctggagtgatgatggaaaagggaatcactaagccgagcattctcgtcgttgccgatgatttcacgggagccaacgacgcgggggtaagcctggcgcaggtggggcatacagttgatgtggcctttgaaatgcattatcgcggtgatgccagcgtatgggtgattaacagcgacagtcgggcgatggatcctaagctggcggcgatgaaaataacctcgctgatgagtcatctccctctggcgaataatccgccgctcgtgattaaaaagatagattccacgctgcgaggcaatatcggcgcagaaattgaagccctgatgaaggcatgcggtataacgggcgcagtggttgcccccgcatttcctcaggcgggaaggaccacagtggccggtgagtgttgggtaaacggtgtgcggataacggaaaccgagtttgccagcgatccgaaaaccccggtattgagcgcccgaattgcggacatcatccggttgcagacggccattccatgccagcccgttacggtttctcagctcagccatttgtcttatgagcaaccgtggattagcgtgatagatgcgcagacggacagcgacctggatcgcatcgctgccgctgtgatgcaggctaaacaaccgctgctgctggtcggctccgctggtatttgtgatgccgttgcccggcgctccgcgattatgccgccacccaccgtgctggccattattggttcaatgagcgaaatcgctcaacggcagatcgccacacttcattcacacccatgtatcacacagatatacgtcgatgttgaacacattctggcaggcaatgccagtgactatgacgcgcgtattgtgcaggccttgcagaaaggcgaccactgcattgtccacacctgtaacgattctgtagcaaggcatcagatcgacaccctttgccagcgttggcagatgagtcgcgctgcacttggggaaaaaatttgtcggtttcttggcgaacttacccggcaagttctgcttcgcacaatgcccgatgcgctttatctctctggtggtgatgtcgcaatggcaacagccagtgcgttaggcgcgaccggatttcgtattacggggaaggtggcgcaatgcgttccatacggtcactttctgggcggtgtctggtcccgttcggtgatgacgaaagccggtgggtttggcgatgaaaccacgttgcatcaggttctgaattttatcgaggagaagtgtagtgaataatattattgcggtaacgatgggtgacccggcgggtattggcccggagatcattattaaatccctgagcgaagccgggcttgctggtgccccggtggtggtggtgggctgtgtgcgcacgctgcgacgtattatggcgatgaatatcacgccgcaggcagagttacgcgtcattcaaaaggtgtgcgacgcccattttgctcccggcgtgattaacgtgatggatgagccgctggctaaccccgatgcgctgacacccggagtggtacaggctgcggcaggcgatttagcgtatcgctgtatcaaacgtgcaacggctctggccttatcaggcgaggtgaaagccatagccactgcgccgctgaataaagaagcgctgcatcttggcgggcataactatccggggcatacggaattgctggcccatcttaccggcagcaaagagtacgcgatggtgctctataccgataagctcaaggttatccatatttcgactcacatctcactgcgtaaattcctggataccttgaatggtgaaagggtcaaaacggttattcgtgttgcgaaccacttcctgaaacgtgttggtattgaacgtccgcgtattgccgtggcgggtgtaaatccacatgcaggggaacatggtttattcggcactgaggaaatcgagattatcgcgcctgcgattgaagcaatgcaggccgaagatattgatgttactggcccgtgcccgccagataccgtgtttatgcaatgccatgaagggctattcgatatggtagtggctatgtaccacgatcaggggcatatccctttaaaactgcttggattttatgatggggtgaatatcaccgccgggttgccatttattcgcacttctgccgaccacggcaccgcgtttgatattgcctggacaggaaaagccaagtctgagagcatggcagtttccatccagttagcaatgcagatttcgcgagaataaaatgaagggatataaccggttagagcagatcatggattacctgaaaagccataatctggtcaccgttgatgagctggtggcggtaaccaatgcgtcgccggctacgattcgtcgagacctgataaaactcgatgagcagggtgttatcagccgtacacatggcggtgtgaccctcaaccggtttattcctacccaaccgactacccatgagaaaatgcagcgcagcctggcggaaaaacatgccatcgccagcgcagcggcgtcaatggtcaaagcgggggattccgtcgtccttgatgccggtacgacaatgattgaacttgcgcggcagattacacatttaccgcttcgcgtgatcaccagcgacctgcatatcgcgctttttttggctgaattcaagcaaattgaagtgacgattatcggcggacgtatcgacgactccagccagtcctgcattggcgaacatggtcgtaaattgctgcaaaatacctggccggacgtggcatttttaagctgtaacagctgggatcttgaaaagggtattacagcacccacggaagagaaagccgcactaaaacgcgatcttatcgcgcatgcttcgcgcaaaattctcctggctgacagctcaaaatacggttcatggtcgctgtttaatatcgcgcatcttaatgaactgacagagattattacggatagtcagcttgatgggcagacgcgtagaacgcttgcgtccttgtcgacgcgtttaatcatagccgactaatctatgactctgcggccagctcatccggcaatttaataaatgcgtcaggctggcgacgtttggccttacgtttccagcgcgaggatctgctggcagtagcgcagaaaacgccccaatatcttacgcaaaaccattttttcgctaactaacagttgtcagcctgtcccgcttataagatcatacgccgttatacgttgtttacgctttgaggaatccacgatgagtgaggcagaagcccgcccgactaactttattcgtcagatcatcgatgaagatctggccagtggtaagcacaccacagtacacacccgtttcccgccggagccgaatggctatctgcatattggccatgcgaaatctatctgcctgaacttcgggatcgcccaggactataaaggccagtgcaacctgcgtttcgacgacactaacccggtaaaagaagatatcgagtatgtcgattcgatcaaaaacgacgtagagtggttaggtttccactggtctggtaacgtccgttactcctccgattattttgatcagctccacgcctatgcgatcgaactgatcaataaaggcctggcgtacgttgatgaactgacgccggaacagatccgcgaataccgcggcaccttgacgcagccgggtaaaaacagcccgtaccgcgatcgcagcgttgaagagaacctggcgctgttcgagaaaatgcgtaccggcggttttgaagaaggtaaagcctgcctgcgtgcgaagatcgacatggcttcgccgtttatcgtgatgcgcgatccggtgctgtaccgcattaagtttgctgaacaccaccagactggcaacaagtggtgcatctacccgatgtacgatttcacccactgcatcagcgatgcgctggaaggtattacgcactctctgtgtacgcttgagttccaggacaaccgccgtctgtacgactgggtactggacaacatcaccattcctgttcacccgcgccagtacgaattctcgcgcctgaatctggaatacactgtgatgtccaagcgtaagctgaacctgctggtgaccgacaagcacgttgaaggctgggatgacccgcgtatgccgaccatttctggtctgcgtcgtcgtggttacactgcggcttctattcgtgagttctgcaaacgcattggtgtgaccaagcaggacaacaccattgagatggcgtcactggaatcctgcatccgtgaagatctcaacgaaaatgcgccgcgcgcaatggcggttatcgatccggtgaaactggttatcgaaaactaccagggcgaaggcgaaatggttaccatgccgaaccatccgaataaaccggaaatgggcagccgtcaggtgccatttagcggtgagatttggatcgatcgcgccgatttccgcgaagaagctaacaagcagtacaaacgtctggtgctgggtaaagaagtgcgtctgcgtaatgcttacgtcattaaggcagaacgcgtggagaaagatgccgaaggcaatatcaccaccatcttctgtacttatgacgccgacaccttaagcaaagatccggcagatggtcgtaaagtcaaaggtgttattcactgggtgagcgcggcacatgcgctgccggttgaaatccgtttgtatgaccgtctgttcagcgtgccgaaccctggtgctgcggatgatttcctgtcggtgattaacccggaatcgctggtgatcaaacagggctttgctgaaccgtcgctgaaagatgcggttgcgggtaaagcattccagtttgagcgtgaaggttacttctgcctcgacagccgccattctacggcggaaaaaccggtatttaaccgcaccgttgggctgcgtgatacctgggcgaaagtaggcgagtaagtttacgttgtcggatagagcgtttacgccgcatccggcaagaaatatgcaaattatcccaaacgccgcgctctgcggcgtttttttctgcgtttttttctgcttttcttcgcgaattaattccgcttcgcaatttatccataaaataaatttaaaatcacaaaacataattaaataaaatgtaaccgctttcatcttgctggaatttcacgtttttattcttctgcaagcctttcaactgcaaacttaagccttgtaacaaaaatcatcaaaatatgtgcggttgctcatgttcttacattctggttacagaaagagattgataattcgcgtcgcgaaaaatagtctgttcctgtagtcagcgagacttttctcaacgctacttttttaatttttatttttttcgctgttcacctttggtgcagcaatttatacgtcaaagaggattaacccatgcgtgcgtttagtggcaaacgtagtacgctggcgctggctatcgccggtgttacagcaatgtcgggctttatggcaatgccggaggctcgcgccgaaggattcatcgacgattcaaccttaaccggcggtatctattactggcagcgtgaacgcgaccgtaaagatatttttttctgcttttcttcgcgaattaattccgcttcgcaatttatccataaaataaatttaaaatcacaaaacataattaaataaaatgtaaccgctttcatcttgctggaatttcacgtttttattcttctgcaagcctttcaactgcaaacttaagccttgtaacaaaaatcatcaaaatatgtgcggttgctcatgttcttacattctggttacagaaagagattgataattcgcgtcgcgaaaaatagtctgttcctgtagtcagcgagacttttctcaacgctacttttttaatttttatttttttcgctgttcacctttggtgcagcaatttatacgtcaaagaggattaacccatgcgtgcgtttagtggcaaacgtagtacgctggcgctggctatcgccggtgttacagcaatgtcgggctttatggcaatgccggaggctcgcgccgaaggattcatcgacgattcaaccttaaccggcggtatctattactggcagcgtgaacgcgaccgtaaagatgttaccgacggcgacaaatacaaaaccaacctttctcactccacctggaatgccaacctcgattttcagtccggttatgctgctgatatgttcggccttgatattgctgcgtttacggcgattgaaatggcggaaaacggcgacagctctcacccgaacgaaatcgcgttttcaaaaagtaataaagcctatgacgaagactggtccggcgataaaagcggtataagcctgtataaagcagcggccaaatttaaatacggtccggtttgggcgagggcaggttacattcagccaactggtcaaacgctgttagcgccgcactggagctttatgccgggtacttatcagggggcggaagccggggcgaattttgattacggcgatgctggtgcgttgagtttctcctacatgtggaccaacgaatacaaagcaccgtggcatctggaaatggatgagttttatcagaacgataaaaccaccaaagttgattatctgcactccatcggtgcgaaatacgacttcaaaaataacttcgtactggaagcagcatttggtcaggcggaagggtatatcgatcaatattttgccaaagccagctacaaatttgatatcgccggtagcccgttaaccaccagctaccagttctatggcacgcgcgataaagttgacgatcgcagcgtcaacgatctttatgacggcaccgcctggctgcaagcattgacctttggttaccgggcggctgacgtagtggatttgcgcctcgaaggcacctgggttaaggctgacggtcagcagggatacttcctgcaacgtatgactccaacctacgcttcttccaacggccgcctggatatctggtgggataaccgttccgacttcaacgctaacggcgaaaaagcggtcttcttcggtgcgatgtatgacctgaaaaactggaatcttccaggcttcgccatcggcgcttcctacgtttacgcatgggatgcaaaacctgcgacctggcagagcaatccggatgcgtactacgacaaaaaccggactattgaagagtctgcctacagcctggatgcggtctacaccattcaggacggtcgcgccaaaggcacgatgttcaaactgcacttcaccgaatacgacaaccactccgacatcccaagctggggcggtggttacggcaacattttccaggatgagcgcgacgtgaaattcatggtaatcgcaccattcaccatcttctgatgcccgacgcggcaggttttgtgcctgccgcacgtttgaggaatttgctatgaaaaaactgattctcatcgccatgatggcatcggggctggtagcttgtgcgcaatcaaccgcaccgcaggaagacagtcgtctgaaagaggcttacagcgcctgtatcaacaccgcgcaaggttcgccggaaaaaattgaagcctgccagagcgtgttaaacgtgctgaagaaagagaaacaacatcagcagtttgccgagcaggaaagtgtccgcgtactggattatcagcagtgtattcaggcaacgcaaaccggaaatgatcaggcggtgaaagccgattgtgataaggtctggcaggaaattcgcagtaataacaaataagtgagagctgtaactctcgcttttcttatttcccttgtataaaaaagccaacctgcaggttggcttttctcgttcaggctggcttatttgccttcgtgcgcgtgctcatcttcgcggcaatcgccttcggcacagtgaccgtaaagatagagactgtggttagtcaggcgaatgccatgttttgcggcgatttcacgctgacgcgcttcgatggaatcatcactaaattcgataaccttaccgcagtcgaggcagatcaggtgatcgtggtgatgttgctgtgtcagttcaaatacggatttaccgccttcaaaattgtggcgggtgacgataccagcgtcgtcaaactggttcagtacgcgatataccgtagccagaccaatttcttcacccatatcgatcagacgtttgtataaatcttccgcactgacgtgatggttgtccggctcctgaagaacttccaggattttcaagcgaggaagcgttactttcaggccagctttctttagggcggtattgttatcagtcatgcggaatctgtcctgttactaagcggttcacttcattagaagaagtgacagaatttgctcttgagataatgcgtatcattatagaattgccacgcctaaatgaaaaccacaagtccctggcaaatattgttaataaaaacgtggcacagcttacatttacaacagcaaggccacttgaacactgggacattgtacaggtacaacagcaaaagttacaaatttgtagcaattattttgattggcattatctattaatacggcgtagacatgagtctacgccgcatcacatcaggcattgagaatttcgtcgagatgcagctcttcagaaatttgtttaacccatttttctacacgttcagcggtcagttccggctgacgatcttcgtcgatagccagaccgacaaagtggtcatcatcagccagaccttttgacgcttcgaagtggtagcccgcggttggccagtgaccaacgatagttgcgccgcgcggttcaatgatgtcgcggatggtgcccaatgcatcgcagaagtattctgcgtaatcttcctggtcgccacaaccaaacagcgcaaccagtttaccattaaaatcaatctcttcgagagtcgggaagaagtcatcccagtcacactgcgcttcgccgtaataccaggttgggatgcccagcagcagaatgtcatatgcttccagatcttctttgctgctttttgcaatgtcatggacatcggcaacgtctttaccaagctgtttttgaatcatttttgcgatattttcggtattaccggtgtcgctgccgaaaaagatgccagtgatagccatgagtgaaataacctcttgaaacttattgaaatgggggtggaaaattgcccacggataaaggcaatcatagcagaacaggcagtcttgcggaatcagcaaacgagcaggactgcacactgtgctacatgaaagtggaaatttaaacgatgccctgactacgcagcgccgccagttgctgcattaacatctcttcgatcagctcgctacggctcatattgcgcgattccgccagctcgttcagtgcctcgacagcttccgcgttcagcttcagttcgacacgcttaaggccacgtactttgtcgcgttttagttggttgcgtttattaatacgcagctgctcatcgcgcgaaagcggattagttttcggtcgtcccggtcgacgctcgtgcgcgaacagatctaatgtcgtacggtccgtttgttctttggccatgatcttggtgacttcgggggaaacaatcagccaggcgcctgcccggatggatagcgcgccataatacatcagcgcgatgagtcacgccaacgtccacgcgcggaaagcgacgcggacgctgggtttttaatcagttgcgttaatcattgagatagcgacggatagcgcgtaataccgcatccggtttttcagcatgaacccagtgacccgcgcctgcaatcacatgagcccgagcctgtggaaattgtgccagtaaatcatcacggtactgctcgctaacatacggagaattgccgccagggataaatagggtaggatgatcccatgccgggattttctcccaacccacaatatgcggatactgatcccacaatactggcacgttaaagcgccactccccatcaacaaaagatttcaacagaaactgaatcaccccttcttcattaagatgctggcgcattattgccgctgcttgctggcgtgtttgtgcgtctgattcactgactgcgttgatggccgcgaaaatctcatcatgacggcgaacgtgataatcgaccggcgcaatatcaatcgccaccagcttgtcaatgcgatcgggggctagtgcagtaagagccattaccgctttaccacccatggagtgaccgataaatgttgctttgtcgatctgctgtgcatccagggtatcaacaagatcctgcgccatcgccgggtaattcattaccggatctctcggtgaaagaccgtggttacgcatatcaacctggatgatattgtgatcgtttaccagatcgcgagccagtacgccaaggttgtcgaggctgccaaatagaccatggacaagaacgatgggagaattattgtgctggttttgtgcagtttgcgcgcggatattcaatttcatggcaaagttctttttttcgcgttgtcgggttagggtattatgttgaccattgtgccacagggctgcaacaaataaggtttattccgagtttttctgcaagccaggcttgacgctatccgctgccgggatttattcatatactcctggcgacttgtattcagctaagacactgcactggattaagatgaaaacgattgaagttgatgatgaactctacagctatattgccagccacactaagcatatcggcgagagcgcatccgacattttacggcgtatgttgaaattttccgccgcatcacagcctgctgctccggtgacgaaagaggttcgcgttgcgtcacctgctatcgtcgaagcgaagccggtcaaaacgattaaagacaaggttcgcgcaatgcgtgaacttctgctttcggacgaatacgcagagcaaaagcgagcggtcaatcgctttatgctgctgttgtctacactatattctcttgacgcccaggcgtttgccgaagcaacggaatcgttgcacggtcgtacacgcgtttactttgcggcagatgaacaaacgctgctgaaaaatggtaatcagaccaagccgaaacatgtgcctggtacgccgtattgggtgatcaccaacaccaacaccggccgtaaatgcagcatgatcgaacacatcatgcagtcgatgcaattcccggcggaattgattgagaaggtttgcggaactatctaaaacgttgcagacaaaggacaaagcaatggcaatccacaatcgtgcaggccaacctgcacaacagagtgatttgattaacgtcgcccaactgacggcgcaatattatgtactgaaaccagaagcagggaatgcggagcacgcggtgaaattcggtacttccggtcaccgtggcagtgcagcgcgccacagctttaacgagccgcacattctggcgatcgctcaggcaattgctgaagaacgtgcgaaaaacggcatcactggcccttgctatgtgggtaaagatactcacgccctgtccgagcctgcgttcatttccgtactggaagtgctggcagcgaacggcgttgatgtcattgtgcaggaaaacaatggcttcactccgacacctgccatttccaatgccattctggttcacaataaaaaaggtggcccgctggcagacggtatcgtgattacaccgtcccataacccgccggaagatggtggtatcaagtacaatccgccaaatggtggcccggctgataccaacgtcactaaagtggtggaagacagagccaacgcactgctggctgatggcctgaaaggcgtgaagcgtatctccctcgacgaagcgatggcatccggtcatgtgaaagagcaggatctggtgcagccgtttgtggaagggctggccgatatcgttgatatggcggcgattcagaaagcgggcctgacgctgggcgttgatccgctgggtggttccggtatcgaatactggaagcgcattggcgagtattacaacctcaacctgaccatcgttaacgatcaggtcgatcaaaccttccgctttatgcacctcgataaagacggtgcgatccgtatggactgctcctccgagtgtgcgatggcgggcctgctggcactgcgtgataagttcgatctggcgtttgctaacgacccggattatgaccgtcacggtatcgtcactccggcaggtttgatgaatccgaaccactacctggcggtggcgatcaactacctgttccagcatcgtccgcagtggggcaaagatgttgctgtcggtaaaacgctggtttcatctgcgatgatcgaccgtgtggtcaatgatttgggccgtaagctggtagaagtaccggtaggtttcaaatggtttgttgatggtttgttcgatggcagcttcggctttggcggcgaagagagtgcaggcgcttccttcctgcgtttcgacggcacgccgtggtccaccgataaagacggcatcattatgtgtctgctggcggcggaaatcaccgctgtcaccggtaagaacccgcaggaacactataacgaactggcaaaacgctttggtgcgccgagctataaccgtttgcaggcagcagcgacttccgcacaaaaagcggcgttgtctaagctgtctccggaaatggtgagcgcctgcaccctggcaggtgacccgatcaccgcgcgtctgacggcggcaccgggtaatggcgcttctatcggcggtctgaaagtgatgactgacaacggctggttcgccgcgcgtccgtcaggcacggaagacgcatataagatctactgcgaaagcttccttggtgaagaacatcgcaagcagattgagaaagaagcggttgagattgttagcgaagttctgaaaaacgcgtaaacatatcaaataagaaaaagggcggtcggaagatcgcccttttttgctttgcttaattaaccgtgtttatttttcagttcaaagcgtggtgagaccagaccatacagtgtccaaccgaggaaggtcacgatggaaccgtatagcatggcttcttccccggatgagtacagcgcataaaagctgtacatcgcgccaacaaaagcaacaaagtttgcaactttcgcttttgaggggggcacattagcgaccttctgaataatgactaatgccgccattgacagaatatacggaatgatattggtcaccacggccaggttaaccagcacgttgaactgactgtttagcgacgggctaatcgtcatcagcgccaacccgctctggataatcacaatggtcaacattccctgcaccggtgcatccactttggttacacgggagaaaattttagggaagtagccttcatcagatgaagatttaaacacctgggcaatggtgaactgccagccaagcagcgaaccgcagcaggacatcaccatcagcgccataatgactttacccacttccggcgtgaacatctgcgcgaaggccagaccaaatggtgccgttgaatttgccagctccatatttggcacaatcccggcaatcacgttggtggagacgatataaatcaccgccgcacctaacgtaccgccgagtaccgcgattggcacattacgttccgggttttccactacatcagtattcgcacacgcagactccagaccaagaaaagcccacagcgtcatagcgatggaagaacctaccgcactgaagaacggtgcatgatgcggattccaggaatcaacgtaaagtgtcgggctaaaccagaaccagccgataatgcacaggcctaccaccggaataatgaccccccacacggtaatgctactgatttgcccggtaatgcgcgcaccaccaaagttagccacggtacaaatccacagcaccccgatggtcgcaagaccaatctgcactggcgacaaactcgcgccgagcagttcggtgccgtaaccaaccgccgaaatagcaatcgcgacgttagcaatcagcagcgagacgccgtaggtatagttcgccataaagttaccggatttaccgaaagcatactcggcataaccgcccatacctcctgatttacggctgaacataccgcattttgcgaatgcccatgccagtgccattgagcctacggctgtcaccagccaggagataattgagattgtcccgacttcggcaagctttgtcggcagcatgatgataccggagcccatcatgttgaccatcgtcagtatggttaactgaacgacacccattttgttcgatttcgcctgactcataatttttcccctttcaacagggtgctttgcgcatcacgaggcttgatgacatagcaccaaacttgcttacgaccatcatgttcttcgatatagacaccctgcagctccggtgcaaaacctggcagcaggttgatgccttcttccagagcgctgaagtaacgcaaaacagcaccaccccagatttcaccaggaacaacacacagcacacccggaggataaggaagcgcaccttcggcagcgatacggccttctgcatccggcagacgaaccagctccacttcaccgcgtaagtaggcgtagttggcttcttgcggattcatgctgacgcgagggaagtgttccttacggaacatctctttttgcagttgtttcacgttgtgacgggcatacaaatcatgcatttcctggcacaactgacgcagggtataaccggcgtagcgctcttcatgctgtttgtagatggaaggcagtacttccgccagaggcgcatcagcttccagtagtttttcgaagcgtaccagcagggcaacaagttgctgcagtttggccatatcttctgccggagtcagcaggaagaggatggagttaagatcgcatttttccggcactacgccattttcgcgcaggaagttagcaagaatcgttgcaggtacaccgaacgcttcatattcgccgttacgtgcatcaatacctggagttgtcagcaacagtttgcacggatcgacaaagtattggttctctgcgtagccttcaaaagaatgccagtgctcaccgggtacaaatttaaagaagcgcagatcaaccgcaatttgcgctgtttcatacgactgccagggtttaccatccaccagttcaggaacgaacgggcgaatgtgctggcagttatcgaggatcaatttgcgggcattaataccgttaaccacacaatccatccacatattacgaccgctgacaccttcatgcattttggcgttgatatccagtgcggcaaacagcggatagaacgggctggtggaggcgtgcatcataaaggcgttgttcatgcgtttgtgcggtacataacgctgttgccctttgatatggctgtcttttttatgaatttgtgaagtctgagaaaaaccagcctgttgtttatgcacagattgcgtaaccagaatacccggatcgttctcattaagctccagcagcagcggcgaacagtccgccatcatcggaataaactgttcatagccgacccatgctgagtcaaacaggatgtagtcacacagatgaccgattttatccaccacctggcgggcgttataaatagtaccgtcgtaggtgcctaactgaatcacagcgaggcggaacggacgcgcttcttttgcccgttgcggtgcaacttctgtaatcagttcacgcagataactttcttcgaagcagtgcgcatcaatgccaccgataaaaccatacgggttacgtgctgtttccagataaaccggtgttgcaccagcctgtagcaaggccccgtgatggttagacttatggttattgcggtcaaacagcaccagatcacccggtgtcagcagggcgtttaaaaccactttgttggaggaggaggtgccgtttaaaacaaagtacgttttatcggcattaaacactttagccgcatgttgctgtgcaatgcatggcgcaccttcatgaatcagaagatcacccattgcaacgtcggcattacacaagtcggagcggaagagcatttcgccaaaatattccacgaactgattgcctgccggatggcgacggaaaaactcacctccctgatgacccgggcagtcaaaagcgctattgccctgattgacataatcgaccagtgcgcggaagaagggcgggcgcagttgcgtttcataatggctggcagcggtttctaactgacgtccataaaactctttccgtgattcgcaatgctcgaagacaccagaaatacgtggcagatattctgctggtacacgttcttcattttccgttgcaataaaaacaggaatgccatagccagtagcgtctatttcatcgagttttccacgttcaacatcattgactgataaaataatagcggcaacgtcaatataattacttttgtcaatattcacgcattcacgatgagtggaaaagcaatccgggcaagaacggctaacggcaatttttaattctgacattttgttcatctctttatttcaggtaatagcaggtcctcaatttctcaaaggagaaattgatcacgccggaaaaaagcaaaaccccaccgctgataaataaatcagtagtttgctttttgcagatgcaataacccagaccagcccggtaactggctatactcgtcatacttcaagttgcatgtgctgcgactcgaattatttagagtttgaaagggttagcagtatatgagcaccgagggatacaggtattaacctgtaatgcttaaagtcagggagacctgtacgcaggggtgccctttagtcagaagactagcgggcattaaagaaatgaaagtcaaaactattacgatgggcaaacttcatgatatgggttgtccgccttatatgaggcattaagcggttattattttccatttacctttacctttttctgtgtcagttgaaggtagggttattctatccatgaaatagctataatctgtgaagaagatcaacaaaaaacgatcatatcccaaataataaatcattaatgatgaatagcgccatattagatgctgttttgttgtttaaatgttgcaattttgtgggttgtattttcattaagaaattaaacctgccaaataataattttcggggcaggtttaataataaattaataattatttaagcgtatttattgaataataattcatggcataaaccgatacccaataccggtttcagtaataaaatggcggggacgggcgggatcttgctccagtttttgtcgcagatgccccatataaatacgcaaatagtggctgtgttcgaccgcgtttggtccccacacctgattgagtaactggcgctgggtgagcacttttccggcgttgttgagcagcacggccagcaggcggaactcaatcggtgtgagatgcacctcttcctcgccgcggtggataacgcgggcggctaaatcgacggtaacatcagaaaatttcaccagcggatcgggcgtggtggtggcggagtggcggcgtaatgcgacgcgcagacgggcctgcaattcgccaatgccaaacggcttactcagataatcatccgctccggcatccagcgcggcgattttatcgctctcttcgctgcgtgcggaaagcacaatcaccggcaccgcgctccactggcgcaggtcgcggataaactcaatcccatcaccgtcgggcaggccgagatcgagaataatcaaatctggcttacgggttgccgcttccagcaagccgcgttgcagcgtttcggcctcaaagacgcgcataccgtcgccctccagcgccgtgcgcagaaagcgacgaatagcctgttcatcttcaacaatcagaacgtttgtcacatatcctcatgaaattcttcaagttcaggggctgtttgctggggaagtgtaacacgaaaacaggcaccaccttccggtcggttgaatgcggtaatggtgccgccgtgtacatccactatcgcccgacaaattgccaacccaagccctacacccggtaccgccgactctttattcccgcgagcaaacttatcaaatatcgtctgctcctggcctggtggaagaccggggccgttatcccagacatccagttgtagattttcgccctcaacgtgggcattgataccaatttcggcctgcgcccccgcatatttcaccgcgttctctagcaggttaatcagcacccgttcaaagagtggcccgtcaacgtggattaaggtcagcggctctggcagagaaagattgatgggcgacgataaacccggttccagcatttgcagcgcgctgccgaccacttcttccagcgttaaccactctttcttcaaattaaagccgccggactgaattcgcgccatatccagtagattattcaccagtcgggtggtgttcagcacatgctgacgaatctcgctggcctggcgggcgtggggcgatccttcgcttgccagatcgagcgttaagatttctgcctgaccgaacagcaccgtaagcggcgtgcgtaaatcatgcgaaagcgccgccagcagggcgttgcggatctgttcacgttcgcttgccatccgcgcctgttcttcgctggcggttagtgtcagtcgctcaagggcattggcgactaacagcgtaaacgtctccagcaggcgctgctgttccgggatcatcaactggcgcagattccccggttccaccaccaccagtccgtaggttttctcgccgctttttagcggcaaaatctggtacggtacaccgggtaacgtgtcggtgcccgcgcccgcaggcaggcctttatcaaaactccactgcgcgatggcatcgtcccacggcgtcattccttgcggatgtgttaaaggctgcaatttaccgttgtcatcaggcagcaacacctggctacgggcatgaaacgtggaggcaataaactgttcgctggtggcggcgatatcctgcgaactacggcccacagccagagctttggacatttcatataagtgccgtgtgcgttgttcgcggtaacgggctacccgcgcctgataacgcacgccagcagtaaggttcccgatcaccagcccgacggttaacatcaccgcgaaggtcagcagatattgcacatcagagacggcgagcgtgccgcgtggggcgataaaaaagagatcgaaactcaccacattaatgacggtggcaaccaccgaaggccagcgtccgtaaaatagtgccaccaccacgacgccaagcagatacagcatcaccaggttggcggcatcaaacgccatcagccactgcatggcaattaaggtgataacggcgcataacgcggcggcaaccacgcatccctgaatctgtacccgccacttgtctttaaaagagcggctatccggcgcgttgttaatcgtgcgggcgggtggttcatcaagcgcgaccagcacctgatcgagatcgggggcgatgcgtgccagccggtcagcaaatgtttcccgacgccaccagcggcgcgaagccgggcgaccgagaataatcttgccgagattatgttcacgggcataacgcactaccgctttctcttccgctggatcagaaagtgttgccgtctccgcgcccagctcctgcgccagacgtaaggcgctgagaattgcccgacgttttttctccggtaagcgatgcagggcaggggtttcaacatacaccgcgtgccagacactgcccaggcgcgaggccaaccgcgccgccgtgcggaccagtttctcactgccggtgttatgcccgatgcataaaaggatcgcgtcgcgtgtgtgccagactttctcttcgccaggatgcccccgccaggcgcgcatttgctcatctacgcgatcggcagtacggcgcagtgccagttcgcgcagggcgatcagattacctttgcggaaaaaatgttcaatggcgcgctccgcctgcccggcaatatagactttgccttctttcagtcgctggcgcagatcgtccgggggcaagtccaccagtactacgtcgtcggcggcatcaaaaaaaggatcgggcacggtctcccgtacctgaattccggtgacgccgctgaccacatcattcagactttccagatgctgaacgttgacggtagtgaaaacatcaatgccagcttccagcagctcttcgatgtcctgccagcgtttaggatgacgtgaacctggcgcattactgtgcgccagttcgtccattaagatcagtgccggacggcgggcgagggcggcatcgagatcaaactcgctgatgtgccgcccacggtacgcctggcgttttaacggcagaacagccagacctttcagcatggcggcggtatctttccgaccgtgggtttctaccacgccaaccacaatatccagcccttgcgcccgcagtcgctgggcttccgccagcatcgcccaggtcttcccgacgcctgcgcaggcaccgaagaatactttcagcttcccccgatgcggcgcggcagcttgttccagcagacgatcggggtcgggacgtaagggttcgttattcatcaagcttatccagtgccagattgagttcgacaatgttgacgaccggctggccgatatatttcaccagcggttgttggctgtattttgcgatcagttgcgtgagctgttcaacgctgagattacgcgctttcgccacgcgtgggatctgccaggccgccgcttgcggggtgatgttattgtccagcccgcttgctgacgccgtcaccagttcaaccggaacgttcgtgctggcatccgggttagcagcccgtaatgcggcaacgcgtgcggctatctgtttatccagctccgggttactgactgccagattgctcccgccagaagcctgtggattatagggcatttctgctgttgccgacgggcgaccatgaaaatagccgttgccggtaaaattttgcccgattaatgccgaaccgcgcaccgtatcaccttcacgaatcaatgaaccgttggcctgccagggaaaccaccattgccccagtgcggtggtcagcagcgggtaaacgccgccagtaatcaataacagaaagagaaatgtcgataatgccggacgtaatccacgcatggtaaacctcacaccagaccgcaaacggttagcagtaaatcaatgactttgataccaataaacggcaccagcagcccacccagaccgtaaatccataagttacggcgcaacatggcagaagcggtaagcggtttataactcacgccttttaacgccaggggaatcaaaaagacgataatcaaggcgttgaaaatgaccgcactgagaatggcggagtcgggcgaatgcaggcgcatgatgttcagcgcatttaactgcggatacgttgccgcgaacgccgctggaataatggcgaagtatttcgccacatcgttggcaatgctgaaggtggtcaacgagccacgggtcatcagcatctgtttgccaatgtgcactacctcgatcaacttggtcgggttggagtcgagatccaccatattgcccgcttctttcgccgcctgggtgccggagttcatcgccaccgcaacatcggcctgtgccagcgccggagcatcgttggtgccatcgccggtcatcgccactaaacggccttccgcctgatactgacgaatcagtgccagcttggcctccggtgttgcttcggcgagaaaatcatcgacacccgcttccgcagctatcgcggcggcagtcaggcggttatcgccggtaatcatcaccgttttaatgcccattttacgcagctgggcgaagcgctctttaataccgcctttgacgatatctttcagcgcaataacgcccagcacacgagaaccttccaccaccaccagcggcgtggctccctgacgcgcaacctgatcgactttttgatcaacatcggcagggaagtgaccgccgttagcctcaacatggcggcgaatggcatcgacagaacctttacggatcatgcggttgtcgatgttgatcccgctcatccggctttgtgcagtaaacggtacaaaggtggcatggagcgactgcacatcgcgctcgcgcaggttaaaacgctgcttggcgaggatcacaatactgcggccttccggcgtttcatcagccagcgaagccagttgtgcggcgtcggccagcgctttttcctccacgccttgtgcggggataaactctgacgcctgacggttaccgagggtgatggtgccggttttatccagcagcagaacgtcaacatcacccgctgcttcaactgctcgcccgctggtggcaataacattcgcgcccagcatccgactcatcccggcgacgccaatcgctgacaacaggccgccaatagtggttgggatcagacagaccagcagtgccaccagtaccgttacgctgactgcattaccgccccacgcggaaaacggccacagcgtggcggttgccagtaaaaagacgatagtcagggcaatcaggagaatggtcagggcaatctcgttcggcgttttacgtcgctgcgcaccttccaccatcgcgatcatccgatccagaaatgtctcgccggggttaacgctgcactcaatcaccagccagtcagaaagaatacgcgtgccgccagtgacggaggcaaaatcaccgccggattcacggatcaccggtgctgattccccggtgatggcgctttcatcgaccgatgcgccgccttcaatgacttcaccatcgcaggggataatatcgccagcttctaccagcacgatgtcacctttacgcagttgatcagcaggaactttgtccgccgcagcgccatatttcggttcgcgcagtttgcgagcaaaagcggtttttttcacccctttcagactgttggcctgcgctttactgcggccttctgccaacgcctcggcgaaattagcgaacagtacggtgacccacagccagccgctaattgccgcgctaaacagcgcattgccaggcatcacaccgcttgccatcgcgatgctaatacaggtggtcagcagacttccgatccagacgataaacatcaccggattgcgccattgcgcctgcgggtttaattttttcaccgcttctttcagcgcctgaacgacaagtgttggttcgaatagcgccagttgtttacgactcatattcagtgctcactcaatatcatcaggagagatattccgccaccggaccaagcgccagggcagggataaaggtcagtgcgccaaccagcaacacggtgccgattaacaggccaacaaacagcgggccgtgcgttggcaatgtgccggagctggcgggttggctctttttactcaccagcgaaccggcaattgccatcaccgggataatcaccccgaagcgcccgacaaacatgcacaacgccagtaaacagttccagaatggagagttggcgcttaatccggcaaaggcgctgccgttgttgttagcggcggatgacacggcgtacagcacttcgctaaaaccatgcgggccagggttgagcatggcgctacgtccggcgtcggtcatcattgccagcgccgcgcccatcagcaccagcgtcggggtgaccagaatcgccagtgcagtcagtttcatctcgcgtacgtcgatttttttacccagatattccggtgtacgaccaatcatcagcccggcaataaacaccgccagcaggacaaacagcatcatgccgtaaaggccggaaccgacgccgccgaataccacttcaccaatttgcatcaaccacatcggcaccatgccaccaagagcggtaaacgaatcatgcatcgcaatcaccgcgccgcaggaagccgccgtagtcacgaccgcaaacaggctactgaccagcacgccgaaacggctctctttaccttccatattgatgctgctgtccgcgccgagcgccagcagatgcggattaccctgaacttctgcccacatcactacgcctgtgcagatgacaaaaatcaccgacatcgcccacagcaacatgcgcccctggcgacgatcgcccgccacttcaccaaaggcaaagcacagcgctgttgggatcaagaaaatcgccagcatttgcacgaagttggtcagtgcggttgggttttcaaacggatgcgacgagttggcattaaaaaagccaccgccgttagttccgagcattttgatcgcttcctgagaagctactggccccattggtaacagctgttgcgatccttcaatggtcgtcacagcctgataaggcaaaaagttttgcagcgcaccttgttgtataaaaaacagtgcgatcaacaatgccacaggggctaacacccataacgtgatgcgtagcagatcgacccaggcattaccgagcgtgctcatgctctggcgggtaaacgcgcgaataagcgcaaaaatcaccgcaatcccgctggcggcagaaagaaagttttgcaccgttaagcccgccatctggctgaaatagctcaacgtggtttcaccgctataagattgccagttggtgttagtgacaaagctgacggcggtattgagcgccagatcccacgacagccccggcaactgctgtggattaagcggcagatagtgctgaccgagcaacataaaaaacagcaccgccagccccagtatattcaggccaagaatggctgagagatactgcttccagttcatctcgcggtcagagacgccaagcgcgctaaagagtacgcgttcaacgcccgtcgtaccaggaagaggtatatcattaatcagccgcgccagcccgctacctaagggacgcgccagcaccattaataccagtaaaaacgtggcaatcagtaagaacccttgcgcagccatcagaacgcctccgcattgatcagggcataaaccagataacccagtaataaaaacaccagcaacacgccggctatcacgcctgcactcacagtgcacctccagtggcctaaaagtgataccggaagggtagagttctggctgcaaagatttcgcaaaaatctgcgggcggggtgtaaaaaaagtataaaaatggcaaaagccatgatttaactaatgtttagtattaatttaacttttatgtaacttaattacacagtgaatgtaaataaaccatcaataagcaaaaataagtggtcggatgagtagtaaaattacacaaacagcggtactattttcatcagataaacgaattcatttttccggtgctattcaccgggtagatacaaaagggggagaaaagtatggaactctacaaagaatatcctgcatggcttatctttttacgccgtacttgtgcggttgcagcgggcgttctggcgctgcctttcatgcttttctggaaagaccgcgcccgcttttatagctacctgcaccgcgtctggtcgaaaaccagcgataaaccggtgtggatggatcaggccgaaaaggcaaccggtgatttttactgattgccaaacatgacgtttaaagaaaaccgccggtggaaacgctggcggttttcttttttcggcgtctacacttactcctgtaaaccgttcaggagcagtaatgaatcaacaactttttgatgacagcacccttatccgcatttttgctttgcatgagttacacaatctcaaagatcgaggactaacgcgcggggcgcttctcgattatcacagccgctataaactcgtctttctggcacattctcagccggagtaccgcaaacttggcccgtttgtggctgatattcaccggtggcaaagtctggatgactattacaaccagtaccgccaacgcgtaattgttttgctttctcaccctgccaaccggcgtgatcatactaacgttttgatgcacgctcagggatattttcgcccacatattgattccacagaacgccagcagctggcggcgcttatcgacagttatcgccgtggcgagcaaccgcttcttgcgccgctgatgcgtatcaaacactatatggcgctttatcctgacgcctggctttcagggcagcgttatttcgaactttggccgcgtgtgattaacttgcgccatgcaggagttttatgactacccatctggtctggtttcgccaggatttacgtcagcacgataatctcgcgctggctgccgcctgccgcaattcgtctgcgcgcgtgctggcgttgtatatcgctacaccacgccagtgggcggcgcataatgtgtcgccgcgtcaggctgaacttatcaatacacaacttaatgcgctacaaatcgcgctggcggaaaaaggcattcctttattgttccgtgaagtggatgactttgccgccagcgtcgaaatagttaaacaggtgtgcgcggaataccgcgttactcatcttttttataactatcagtatgaggtgaatgagcgggcgcgggatgtgcaggctgagaggacgctgcgtaacgtggtgtgtgaaggatttgatgacagcgtgatcctgccgccgggggcggtgatgactggcaatcatgagatgtacaaagtctttacgccttttaaaaacgcatggttgaaacggctgcgggaagggatgccggagtgcgtcgctgcaccaaaagttcgtagtagcggatcgatagagcccgcgccatccattacgctgaattatcctcgtcagtctttcgatactgcgcatttcccggtggaagaaaaagcggcgattgcgcaattacgccagttttgcctgaacggtgccggagagtatgagcaacaacgagattttccggcagtggaaggcaccagtcgtttgtccgccagcctggcaacgggcgggttatcgcctcgccagtgtttacatcgcctgttggcggaacaaccgcaggtgctggaaggcggaccggggagcgtctggcttaatgagctgatatggcgcgagttctaccgccatttgatgacgtattatccttcgctgtgtaaacatcgtccgtttattgcctggacggatcgtgtacagtggcaaagcaatcccgcccatttaaaggcctggcaggagggcaaaacgggatacccgattgtcgatgctgccatgcgtcagcttaacagcactggctggatgcataaccggctacggatgattacagccagttttctggtgaaagatttgttgatcgactggcgcgaaggcgagcgatatttcatgtcgcagttgattgatggtgatttggcagctaataacggtggctggcagtgggctgcttctacgggtactgatgcagcgccgtattttcgtattttcaacccgacaactcagggcgagaaatttgaccgcgaaggcgaatttatccgccagtggctaccggagctgcgcgatgtaccggggaaagcggtgcatgagccgtggaagtgggcagagaaaacaggtgtgacgttggattatccgcaaccgatagtcgatcacaaagaggcaaggctgcgaacgctggcagcgtacgaagaagcgaggaaaggagcctgataaaacgcagcgagcgttttatcaggcatggtgctggcttattaagactccagcgccagcgcgcggtttctgaacttaagcgcctgatacagccaaatcatcagtaccagtcctacacacgccagtgcgccccaggtaatttgatcaaatacttcaatatatgcattgatggagtagttgatcgccccggaagcatcaaacgaagcctgcgacgtctgatcggcaatcacgcccgccagatagttcgcaatcgcgccggaaagcagcatataaatgccggttaatacgccggtcacgccggggatttcaatgcgcgtaatctgcgacatagcaaccggatcgataaacagttccgcaaagcccatcaccgccaggcctaacaccatcagtggcagagaagagtgaccatacattgcggaccagcgggcgcttaaggtcagaatgcagaatccggcgctcatcaggccaaggccaagagcaaattttccccagatgcgcacggtacgattacctgcgacgctttctttaaccacccacgccaggaacacaccgcacagcataactgcgaaggcattaatcgactggaacatagcagtcggaacggtataaccaaacatatcgcggttaacgaagcggtcgatataaaggctaatcgagctacccccctgttgtgcgaatgcccagaacaacatgctgaagaaggtgagggtaacaatcagccccagctccttacgctgtttttggttttctgctttgcgataaatttttgccagaaccccaaggccaatgatcgtcgcgacaatcaaggcgtataccgaccactctttccagaacaacacggtaatcagcgcaggcgttgccaccagcagaaccagtagccatccccagttgggcaggagaaagtttgtcgcacgcagtacctttttgttaacgccgcgggtatgtgtgaaatgacgattgccacataagaaaatgaccagacccgcgatcatacccaccgccgccaggccaaagcccatcgcccaactgtactcttcctgggcgaaaccacaggcgataggtgcgataatagaccccacgttacccgccgcatacatcagcgagaaaccgccatcacgacgtggatcggttggctcatacagctcgccgagcaggcaactgacgttggatttaaacagaccatagccgcagacgataatcgccagggacagatagaggaatgacggatggatctcactggcacccagcaccacatgaccgatcgccatcaacaacgcccccagcatcaccgccatgcgattgccgagaactttatccgccaaaaagccaccgaggattggcgtgacatataccagcgaacagtaggcgctaaataactcgtaggcgtgattatcgctatattttagttgattggtgagatagaggatcagcagggcacgcatgccgtaaaagctaaaatattcccagatttgcagcgcaacgacatagtaaatagcgcgcggttgtgatgcgtgtttattcataataattccacaattgactgcaacgtcacgtaatagttgcgcggcgtgcttgtgtttccttaaagttaaaactttgatacagatctgattatttatgcaatatgctgtctgattgcataaatatacattagctgaagcgtgatgatataaacaatttgcgtcttttggcgtcgggtttgtttcttaatatgtcaaaagattggctatcgacgaacaggcgaggtaacgctatgttaacggtgtagctatcagaatacggaaggcgcgaagatgaaaaacaccgaactggaacaactgattaacgaaaaactgaacagcgcggcgattagtgattacgcgccgaatggtttgcaggtggaaggcaaagagacggtgcaaaaaattgttaccggtgtcactgccagccaggctttgctcgatgaggcagtgcgtctgggcgcggatgcggtcattgtgcatcatggctacttctggaaaggcgaatctccggtcattcgcggaatgaagcgtaaccgtttaaaaacgttgctggcgaatgatatcaacctgtatggctggcatctgcccctggacgcgcatccggagctgggtaataacgcacaactggcggcgttactggggatcacggtcatgggcgaaattgagccgttggtgccgtggggcgaactgaccatgcctgtgccgggactggaactggcctcctggattgaagcgcgtctgggacgtaagccgttatggtgtggcgataccgggcctgaggtggtccagcgcgtcgcctggtgcacggggggcgggcaaagttttatcgatagcgccgcgcgttttggcgtggatgcttttattactggcgaagtttctgaacagaccattcattcagcccgtgagcagggattgcatttttatgctgcgggtcaccatgccactgaacgcggtggtattcgcgcattgagcgagtggctgaatgaaaataccgatcttgatgtgacctttattgatattcctaatcctgcataacgaataatcagagggatcgaaagtgcaacgagcgcgttgttatctgataggtgaaacggcggtagtactggaactggaaccgccggtgacgctggctagccagaaacggatctggcgactggcacagcgtctggtggatatgccgaatgtggttgaagccattcctggcatgaacaatatcacagtgattttgcgtaatcctgagtcgctggcgctggatgccatagagcgtttgcaacgctggtgggaggagagtgaggcgctggagccggagtctcgctttattgaaattccggtggtttacggtggcgcagccggaccggatttggcggtggtcgcggcgcattgtggattgagcgaaaaacaggttgttgaattgcactcctccgtggaatacgtggtctggtttttaggttttcaaccgggcttcccgtatctcgggagtttgccggaacaactacacacgccacggcgcgcagaaccgcgcttgcacgttccggcaggttctgttgggatcggcgggccgcagaccggtgtttatccgctggcaacgccgggtggctggcagttggttggtcatacctcactcagcctgtttgatccggagcgtgacgaacccatcttattacgtccgggagacagcgtgcgctttgtaccccagaaggagggagtatgctgaagattattcgtgcgggcatgtacaccaccgtgcaggatggcggccgtcacggctttcgtcagtctggtatcagccactgtggcgcactggatatgcctgcgctgcgcattgctaacctgctggtgggtaatgacgccaacgcccccgcgctggagatcacgctcggtcagttaacggttgagttcgaaactgatgggtggtttgccctgacgggtgccggttgcgaagcgcggctggatgataacgccgtctggaccggctggcgattgccaatgagagcaggccagcgtttaacgcttaaacgcccgcagcacgggatgcgcagttatcttgcggtcgcgggtggtattgatgttccgccggtaatgggatcatgcagcaccgatctcaaagtggggattggcgggttggaaggccgtttactgagggatggtgaccgactcccgattggcaaagcgaagcgtgattttatggaagcgcagggcgttaaacagctgctgtggggcaaccgcattcgcgccttgccggggccggaatatcatgagttcgatcgcgcctcgcaggatgcattctggcgttcgccctggcagcttagctcgcaaagtaaccgcatgggctatcgcttacaggggcaaattttaaaacgcaccaccgatcgcgaactgttatctcacggtttgttaccaggtgtggtgcaggtgccgcataacgggcagcccattgtgttgatgaacgatgcgcaaaccaccggtggttacccgcgtattgcctgtatcattgaggctgatatgtaccatctggcgcaaattccgctcggtcagccgattcattttgtccagtgttcactggaagaggcactgaaagcacggcaagatcaacaacgttatttcgaacaattagcgtggcggctgcacaatgaaaattgacctgaacgccgatctgggcgaaggctgcgccagcgacgcagaactattaacgctggtttcctctgccaatattgcctgtggatttcatgcaggcgatgcgcaaaccatgcaggcttgcgtgcgtgaagcaataaaaaatggtgtcgcgattggcgctcacccgagttttcccgacagggaaaattttggtcgcagcgccatgcagctgccgccagaaaccgttttcgcccagacgctgtatcaaattggcgcgctggcagcgattacccgtgcgcaaggtggcgtaatgtgtcatgtcaaaccgcacggcatgttatacaaccaggcggcgaaagaggcacaactggcagacgctatcgccagagcggtatacgcttgcgatccggcattgattctcgtcgggctggcaggaagcgagctgattcgtgcaggcgaacgatatggcctggtaacgcgcgaggaagtgtttgccgatcgtggttatcaggcagacggttcgctggtgccgcgaagccagccaggcgcgttgattgaaaacgaagaacaggcgctggcgcaaacgttggagatggtgcaacacggcagagtcaaaagtatcaccggcgaatgggcaatggtcacggcgcaaacggtctgcctacatggcgatggcgagcacgcactggcgttcgcccgccgattacgagctacatttgctgaaaaggggatagttgtcgcagcataaccccgcttaataaagaatgaaaaaaggatatcaccatgcctgaaggcccggagatccgccgtgcagcggataacctggaggcggcgatcaaaggcaaaccactaactgatgtctggtttgccttcccgcagttaaaatcttatcaatcacgacttatcggtcaacacgttacccatgtggaaacgcgtggtaaggcgttgttaactcatttttccaacgacttaacgctctacagccataatcagctttacggcgtctggcgcgtggttgataccggcgaagagccgcagaccacgcgagtactgcgggtaaaactgcaaacggctgacaaaaccattctgctttatagcgcctcggatattgagatgttgactccggaacaactgaccacgcatccgtttttacaacgcgttggtcccgatgtgctggatccgaatctgacgccggaggtggtaaaggaacgattattgtcgccgcgctttcgtaaccgccagtttgctggattactgctcgatcaggcgtttctggcaggacttggcaattatttgcgggtggagatcctctggcaggttgggttgaccggaaatcataaagcgaaagatctcaatgcggcgcaactggatgcactcgcacacgcgttactggatattccgcgactttcttacgctacgcggggccaggtggatgaaaacaaatatcatggggcgctgtttcgctttaaggtttttcatcgtgatggcgaaccgtgcgaacgctgtggcggcatcattgagaaaaccacgctgtcatcgcgcccgttttactggtgccctggctgccagcactaggccgaacgcttcggcgcataggttgaaataaaccgtgcgatggcaggccccgtcagcaaaatactgaacaggcgcagggtttgcatcgccatgatgagcgccatatcggcattgctccctgcggcgatgaccgccacggtatcaagcccgccggggctggtggcgaggtaggcggtcataaaatcaatatgcataaaccgggtcagcccccacgccatacccgcacaaatagccagcagagcaaaaatcgacagcaggatttgcggtagcgggcgcaatgcccgcagtaatatttgcttatcgaaaccaagaccaatccgccagccaattgccatatatgccatcgccagcagccattccgggagttcgatggtgatgagctgaccagactggagcactgcgcccgccagcatcgggatgagcatcgtgccggaaggaagacgtagcaagcatcccgccgtaccggcaacgaccgcgagcaaaatcgtaagcaggagattaatgctcactggcgggaaccagacgatctgctggttaaccgcttcagcgttatcgcccagcatcatgcgggtgaccagaacagcggctcctgcgacgaacagcactcgcagatattgcataaacgccaccagacgaatatctgcgccgtaatcttgcgccattgcgaccattgccgccgcgccgccaggagaagaaccccaggccccggtatttcctggcagcgagctatagcgcaccaataaccaacccacgatggcgctggaaagcagcgtcaccagtaaaatcgcaagcacgatcggccagttgacggccagcgtggtgagaatcgaaccagtgaggttttgtgcaatcatgcagccaagaatggcttgggcagcgagaaaagcggagcggggaagttgcagagtgactccgcgcatactgaagatgatccccgcgatcatcgggccaagcaggagtgccgccgggagatgtaaagcgaggaagccaatagaaaggagaagtgacagaacacataacattccccactgcaatacaggcattcttcgcttcctcattattttatctttggtgtatcgatacagcataaagaaagctgggtctggaaaaaataacggtaatcaaggaaaaggggaaaatcagcaataatctgaatacgttgccctttccggctgaaaagggcgtcgtgttaaatcagttatagttaatcttaaaaagtaccactgtatcgaagggacccgccgcgatgggagtgccaggtgtggacgataattcagccgtataggttttttcgtagatcagcatatcactggtgaaatcggcgtattaagcatatttattgaatgtataaggcgaggcgttttcatccagtatacgtagcttcagaccattaccaatcaacaatgctttatcttcttcaaccaacgttttttcggtataaaacgaggagctgaccttaaatccgtcggtacactggtcattttgcgattttgttgtcttgatactgaatgttttcgacattgtgtggcggcgaatatccagtaagttaaatttacccaaatcaatcaccagtgtttccggtgaaatattttttcaccattattaatgggtatttgcatctggtttaatttttacaattttttatgttcagccatataaaaagaacccgctctattaaaggcgggtccggaaagtgaacggcttagcaatcaaccattaacgcttgatatcgcttttaaagtcgcgtttttcatatcctgtatacagctgacgcggacgggcaatcttcataccgtcactgtgcatttcgctccagtgggcgatccagccaaccgtacgtgccatagcgaagatcacggtgaacatagaagacggaatacccatcgctttcaggatgataccagagtagaaatcgacgttcgggtacagttttttctcgataaagtacgggtcgttcagcgcgatgttttccagctccatagccacttccagcaggtcatctttggtacccagctctttcagaacttcatggcaggtttcacgcattactgtggcgcgcgggtcgtaatttttgtacacgcggtgaccgaagcccatcaggcggaaagaatcatttttgtctttcgcacgacgaacaaattctggaatgtgtttaacggagctgatttcttccagcattttcagcgccgcttcgttagcaccaccgtgcgcaggtccccacagtgaagcaatacctgctgcgatacaggcaaacgggttcgcacccgaagagccagcggtacgcacggtggaggtggaggcgttctgttcatggtcagcgtgcaggatcagaatacggtccatagcacgttccagaatcggattaacttcatacggttcgcacggcgtggagaacatcatattcaggaagttaccggcgtaggagagatcgttgcgcgggtaaacaaatggctgaccaatggaatacttgtaacacatcgcggccatggtcggcatttttgacagcaggcggaacgcggcaatttcacgatgacgaggattgttaacatccagcgagtcgtgatagaacgctgccagcgcgccggtaataccacacatgactgccattggatgcgagtcgcgacggaaagcatggaacagacgggtaatctgctcgtggatcatagtatgacgggtcaccgtagttttaaattcgtcatactgttcctgagtcggtttttcaccattcagcaggatgtaacaaacttccaggtagttagaatcggtcgccagctgatcgatcgggaaaccgcggtgcagcaaaataccttcatcaccatcaataaaagtaattttagattcgcaggatgcggttgaagtgaagcctgggtcaaaggtgaacacaccttttgaaccgagagtacggatatcaataacatcttgacccagcgtgcctttcagcacatccagttcaacagctgtgtccccgttgagggtgagttttgcttttgtatcagccatttaaggtctccttagcgccttattgcgtaagactgccggaacttaaatttgccttcgcacatcaacctggctttacccgtttgttatttggctcgccgctctgtgaaagaggggaaaacctgggtacagagctctgggcgcttgcaggtaaaggatctattgatgacgaataaatggcgaatcaagtacttagcaatccgaattattaaacttgtctaccactaataactgtcccgaatgaattggtcaatacttccacactgttacataagttaatcttaggtgaaataccgacttcataacttttacgcattatatgcttttcctggtaatgtttgtaacaactttgttgaatgattgtcaaattagatgattaaaaattaaataaatgttgttatcgtgacgcagatcactgttcgggataaaacccgacaaactatatgtaggttaattgtaatgattttgtgaacagcctatactgccgccaggtctccggaacaccctgcaatcccgagccacccagcgttgtaacgtgtcgttttcgcatctggaagcagtgttttgcatgacgcgcagttatagaaaggacgctgtctgacccgcaagcagaccggaggaaggaaatcccgacgtctcctggtaacagaaagttaacctctgtgcccgtagtccccagggaataataagaacagcatgtgggcgttattcatgataagaaatgtgaaaaaacaaagacctgttaatctggacctacagaccatccggttccccgtcacggcgatagcgtccattctccatcgcgtttccggtgtgatcacctttgttgcagtgggcatcctgctgtggcttctgggtaccagcctctcttcccctgaaggtttcgagcaagcttccgcgattatgggcagcttcttcgtcaaatttatcatgtggggcatccttaccgctctggcatatcacgtcgtcgtaggtattcgccacatgatgatggattttggctatctggaagaaacattcgaagcgggtaaacgctccgccaaaatctcctttgttattactgtcgtgctttcacttctcgcaggagtcctcgtatggtaagcaacgcctccgcattaggacgcaatggcgtacatgatttcatcctcgttcgtgctaccgctatcgtcctgacgctctacatcatttatatggtcggttttttcgctaccagtggcgagctgacatatgaagtctggattggtttcttcgcctctgcgttcaccaaagtgttcaccctgctggcgctgttttctatcttgatccatgcctggatcggcatgtggcaggtgttgaccgactacgttaaaccgctggccttgcgcctgatgctgcaactggtgattgtcgttgcactggtggtttacgtgatttatggattcgttgtggtgtggggtgtgtgatgaaattgccagtcagagaatttgatgcagttgtgattggtgctggcggcgcaggtatgcgcgcggcgctgcaaatttcccagagtggccagacctgtgcgctgctctctaaagtcttcccgacccgttcccataccgtttctgcgcaaggtggtattaccgttgcgctgggtaatacccatgaagataactgggaatggcatatgtacgacaccgtaaaagggtcggactatatcggtgaccaggacgcgattgaatatatgtgtaaaaccgggccggaagcgattctggaactggaacatatgggcctgccgttctcgcgtcttgatgatggtcgtatctatcaacgtccgtttggcggtcagtcgaaaaacttcggcggcgagcaggcggcacgtactgcggcggctgccgaccgtaccggtcacgcactgttgcacacgctttatcagcagaacctgaaaaaccacaccaccattttctccgagtggtatgcgctggatctggtgaaaaaccaggatggcgcagtggtcggttgtaccgcactgtgcatcgaaactggtgaagtggtttactttaaagctcgcgcgacagtgctggcgactggcggggcagggcgtatttatcagtccaccaccaacgcccacattaacactggcgacggtgtcggcatggctatccgtgcaggcgtaccggtacaggatatggaaatgtggcagttccacccgaccggtattgccggtgcgggcgtactggtcaccgaaggttgccgtggtgaaggcggttatctgctgaacaaacatggcgaacgctttatggaacgttatgcgccgaacgccaaagacctggcgggccgtgacgtggtggcgcgttccatcatgatcgaaatccgtgaaggccgcggctgtgatggtccgtgggggccacacgcaaaactgaaacttgaccatctggggaaagaagttcttgaatcccgtctgccgggtatccttgaactctcccgcaccttcgctcacgttgatccggtgaaagagccgattccggttatcccaacctgtcactacatgatgggcggtattccgaccaaagtgaccggtcaggcgctgactgtgaatgagaaaggcgaagatgtggttgttccggggctatttgccgttggtgaaatcgcttgtgtatcggtacatggcgctaaccgtctgggcggcaactcgctgctggacctggtcgtatttggtcgtgcggcaggtctgcatctgcaagagtctatcgccgagcagggcgcactgcgcgatgccagcgagtctgatgtagaagcgtctctggatcgcctgaaccgctggaacaataaccgtaacggtgaagatccggtggcgatccgtaaagcactgcaagaatgtatgcagcataacttctcggtcttccgtgaaggtgatgcgatggcgaaagggcttgagcagttgaaagttatccgcgagcgtttgaaaaatgcccgtctggatgacacttcaagtgagttcaatacccagcgcgttgagtgcctggaactggataacctgatggaaacggcgtatgcaacggctgtttctgccaacttccgtaccgaaagccgtggcgcgcatagccgcttcgacttcccggatcgcgatgatgaaaactggctgtgccactccctgtatctgccagagtcggaatccatgacgcgccgaagcgtcaacatggaaccgaaactgcgcccggcattcccgccgaagattcgtacttactaatgcggagacaggaaaatgagactcgagttttcaatttatcgctataacccggatgttgatgatgctccgcgtatgcaggattacaccctggaagcggaagaaggtcgcgacatgatgctgctggatgcgcttattcagctgaaagagaaagatcccagcctgtcgttccgccgctcctgccgtgaaggtgtgtgcggttccgacggtctgaacatgaacggtaagaatggtctggcctgtattaccccgatttcggcactcaaccagccgggcaagaagattgtgattcgcccgctgccaggtttaccggtgatccgcgatttggtggtagacatgggacaattctatgcgcaatatgagaaaattaagccttacctgttgaataatggacaaaatccgccagctcgcgagcatttacagatgccagagcagcgcgaaaaactcgacgggttgtatgaatgtattctctgcgcatgttgttcaacctcttgtccgtctttctggtggaatcccgataagtttatcggcccggcaggcttgttagcggcatatcgtttcctgatcgatagccgtgataccgagactgacagccgcctcgacggtttgagcgatgcattcagtgtattccgctgtcacagcatcatgaactgcgtcagtgtatgtccgaaggggctgaacccgacgcgcgccatcggccatatcaagtcgatgttgttgcaacgtaatgcgtaaacccaggcctgataagacgcgcaagcgtcgcatcaggcaaccagtgccggatgcggcgtgaacgccttatccggcctacaaaagaaatgcagaaaccgtaggcctgataagacgcacaagcgtcgcatcaggcaaccagtgccggatgcggcgtgaacgccttatccggcctacaaaagaaatgcagaaaccgtaggcctgataagacgcgcaagcgtcgcatcaggcaaccagtgccggatgcggcgtgaacgccttatccggcctacaaaagaaatgcagaaaccgtaggcctgataagacgcgcaagcgtcgcatcaggcaaacagcgccggatgcggcgtgaatgccttatccggcctacaaaagaaatgcaggaaatctttaaaaactgcccctgacactaagacagtttttaaaggttccttagcggacgcagaaaacacgacaagtccgcaacaagtgaaccccggcacgcacatcagatatgaaatgtgcgtggtagtatccacggcgaagtaagcataaaaaagatgcttaagggatcacgatgcagaacagcgctttgaaagcctggttggactcttcttacctctctggcgcaaaccagagctggatagaacagctctatgaagacttcttaaccgatcctgactcggttgacgctaactggcgttcgacgttccagcagttacctggtacgggagtcaaaccggatcaattccactctcaaacgcgtgaatatttccgccgcctggcgaaagacgcttcacgttactcttcaacgatctccgaccctgacaccaatgtgaagcaggttaaagtcctgcagctcattaacgcataccgcttccgtggtcaccagcatgcgaatctcgatccgctgggattgtggcagcaagataaagtggccgatctggatccgtctttccacgatctgaccgaagcagacttccaggagaccttcaacgtcggttcatttgccagcggcaaagaaaccatgaaactcggcgagctgctggaagccctcaagcaaacctactgcggcccgattggtgccgagtatatgcacattaccagcaccgaagaaaaacgctggatccaacagcgtatcgagtctggtcgcgcgactttcaatagcgaagagaaaaaacgcttcttaagcgaactgaccgccgctgaaggccttgaacgttacctcggcgcaaaattccctggcgcaaaacgcttctcgctggaaggcggtgacgcgttaatcccgatgcttaaagagatgatccgccacgctggcaacagcggcacccgcgaagtggttctcgggatggcgcaccgtggtcgtctgaacgttctggtgaacgtgctgggtaaaaaaccgcaagacttgttcgacgagtttgccggtaaacataaagaacacctcggcacgggcgacgtgaaataccacttgggcttctcgtctgacttccagaccgatggcggcctggttcacctggcgctggcgtttaacccgtctcaccttgagattgtaagcccggtcgttatcggttctgttcgtgcccgtctggacagactcgacgagccgagcagcaacaaagtgctgccaatcaccattcatggtgacgccgcagtgaccgggcagggcgtggttcaggaaaccctgaacatgtcgaaagcgcgtggttatgaagttggcggtacggtacgtatcgttatcaacaaccaggttggcttcaccacctctaacccgctggatgcccgttcgacgccgtactgtactgatatcggtaagatggttcaggcaccgattttccacgttaacgcggatgatccggaagccgttgcctttgttacccgtctggcgctcgatttccgtaacacctttaaacgtgatgtcttcatcgacctggtatgctaccgccgtcacggccacaacgaagccgacgagccgagcgcaacccagccgctgatgtatcagaaaatcaaaaaacatccgacgccgcgcaaaatctacgctgacaagctggagcaggaaaaagtcgcgacgctggaagatgccaccgagatggttaacctgtaccgcgatgcgctggatgctggcgattgcgttgtagcagagtggcgtccgatgaacatgcactctttcacctggtcgccgtacctcaaccacgaatgggacgaagagtacccgaacaaagttgagatgaagcgcctgcaggaactggctaaacgcatcagcacggtgccggaagcagttgaaatgcagtctcgcgttgccaagatttatggcgatcgccaggcgatggcagccggtgagaaactgttcgactggggcggcgcggaaaacctcgcttacgccacgttggttgacgaaggcattccggttcgcctgtcgggtgaagactccggtcgcggtaccttcttccaccgccacgcggtgatccacaaccagtctaacggttccacttacacgccgctgcaacatatccataacggccagggcgcgttccgcgtctgggactctgtactgtctgaagaagccgtactggcgtttgaatacggttatgccaccgcagaaccacgcaccctgaccatctgggaagcacagttcggtgacttcgccaacggtgcacaggtggttatcgaccagttcatctcctctggcgaacagaaatggggccggatgtgtggcctggtgatgttgctgccgcacggttacgaagggcaggggccggagcactcctccgcgcgtctggaacgttatctgcaactttgcgctgagcaaaacatgcaggtttgcgtaccttctaccccggcacaggtttaccacatgctgcgtcgtcaggcgttgcgcgggatgcgtcgtccactggtcgtgatgtcgccgaaatccctgctgcgtcatccgctggcggtatccagcctcgaagaactggcgaacggcaccttcctgccagccatcggtgaaatcgacgagcttgatccgaagggcgtgaagcgcgtagtgatgtgttctggtaaggtttattacgacctgctggaacaacgtcgtaagaacaatcaacacgatgtcgccattgtgcgtatcgagcaactctacccgttcccgcataaagcgatgcaggaagtgttgcagcagtttgctcacgtcaaggattttgtctggtgccaggaagagccgctcaaccagggcgcatggtactgcagccagcatcatttccgtgaagtgattccgtttggggcttctctgcgttatgcaggccgcccagcctccgcctctccggcggtagggtatatgtccgttcaccagaaacagcaacaagatctggttaatgacgcgctgaacgtcgaataaataaaggatacacaatgagtagcgtagatattctggtccctgacctgcctgaatccgtagccgatgccaccgtcgcaacctggcataaaaaacccggcgacgcagtcgtacgtgatgaagtgctggtagaaatcgaaactgacaaagtggtactggaagtaccggcatcagcagacggcattctggatgcggttctggaagatgaaggtacaacggtaacgtctcgtcagatccttggtcgcctgcgtgaaggcaacagcgcgggtaaagaaaccagcgccaaatctgaagagaaagcgtccactccggcgcaacgccagcaggcgtctctggaagagcaaaacaacgatgcgttaagcccggcgatccgtcgcctgctggctgaacataacctcgacgccagcgctattaaaggcacgggtgtgggtggtcgtctgacccgtgaagatgtggaaaaacatctggcgaaagccccggcgaaagagtctgctccggcagcggctgctccggcggcgcaaccgaccctggctgcacgtagcgaaaaacgtgtgccgatgactcgcctgcgtaagcgtgtggcagagcgtctgctggaagcgaaaaactccaccgccatgctgaccacgttcaacgaagtcaacatgaagccgattatggatctgcgtaagcagtacggtgaagcgtttgaaaaacgccacggcattcgtctgggctttatgtccttctacgtgaaagcggtggttgaagccctgaaacgttacccggaagtgaatgcgtctatcgacggcgatgatgtggtctaccacaactatttcgacgtcagtatggcggtttctacgccgcgcggcctggtgacgccggttctgcgtgatgtcgataccctcggcatggcagacatcgagaagaaaatcaaagagctggctgttaaaggccgtgacggcaagctgacggttgaagatctgaccggtggtaacttcaccatcaccaacggtggtgtgttcggttccctgatgtcaacgcctatcatcaacccaccgcagagcgcaattctgggtatgcacgctatcaaagatcgtccgatggcagtgaatggccaggttgagatcctgccgatgatgtacctggcgctgtcctacgatcaccgtttgatcgatggtcgcgaatccgtgggcttcctggtaacgatcaaagagttgctggaagatccgacgcgtctgctgctggacgtttagtagtttaagcttcacctgcactgtagaccgacgtggatagggtgtcggtctacggtttaaaagataacgattactgaaggatggacagaacacatgaacttacatgaatatcaggcaaaacaactttttgcccgctatggcttaccagcaccggtgggttatgcctgtactactccgcgcgaagcagaagaagccgcttcaaaaatcggtgccggtccgtgggtagtgaaatgtcaggttcacgctggtggccgcggtaaagcgggcggtgtgaaagttgtaaacagcaaagaagacatccgtgcttttgcagaaaactggctgggcaagcgtctggtaacgtatcaaacagatgccaatggccaaccggttaaccagattctggttgaagcggcgaccgatatcgctaaagagctgtatctcggtgccgttgttgaccgtagttcccgtcgcgtggtctttatggcctccaccgaaggcggcgtggaaattgaaaaagtggcggaagaaactccgcacctgatccacaaagttgcgcttgatccgctgactggcccgatgccgtatcagggacgcgaactggcgtttaaactgggtctggaaggtaaactggttcagcagttcaccaaaatcttcatgggcctggcgaccattttcctggagcgcgaccttgcgcttatcgaaatcaacccgctggttattaccaaacagggcgatctgatttgcctcgacggcaaactgggcgctgatggcaacgcactgttccgccagcctgatctgcgtgaaatgcgtgaccagtcgcaggaagatccgcgtgaagcacaggctgcacagtgggaactgaactacgttgcgctggacggtaacatcggttgtatggttaacggcgcaggtctggcgatgggtacgatggacatcgttaaactgcacggcggcgaaccggctaacttcctggacgttggcggcggcgcaaccaaagaacgtgtaaccgaagcgttcaaaatcatcctctctgacgacaaagtgaaagccgttctggttaacatcttcggcggtatcgttcgttgcgacctgatcgctgacggtatcatcggcgcggtagcggaagtgggtgttaacgtaccggtcgtggtacgtctggaaggtaacaacgccgaactcggcgcgaagaaactggctgacagcggcctgaatattattgcagcaaaaggtctgacggatgcagctcagcaggttgttgccgcagtggaggggaaataatgtccattttaattgataaaaacaccaaggttatctgccagggctttaccggtagccaggggactttccactcagaacaggccattgcatacggcactaaaatggttggcggcgtaaccccaggtaaaggcggtactacccacctcggcctgccagtgttcaacaccgtgcgtgaagctgttgctgctactggcgctaccgcctctgttatctacgtaccagcaccgttctgcaaagactccattctggaagctatcgatgcaggcatcaaactgattatcaccatcactgaaggcatcccgacgctggatatgctgacggtgaaagtgaaactggatgaagcaggcgttcgtatgatcggcccgaactgcccaggcgttatcaccccgggggaatgcaaaatcggtatccagccgggtcacattcacaaaccgggtaaagtgggtatcgtttcccgttccggtacgctgacctatgaagcggttaaacagaccacggattacggtttcggtcagtcgacctgcgttggtatcggcggcgacccgatccctggttctaactttatcgacatcctcgaaatgttcgaaaaagatccgcagaccgaagcgatcgtgatgatcggtgagatcggcggtagcgctgaagaagaagcagcggcgtacatcaaggagcacgttaccaagccagttgtgggttacatcgctggtgtgactgcgccgaaaggcaaacgtatgggtcacgcaggtgcgatcattgccggtggtaaagggactgcggatgagaaattcgctgctctggaagccgcaggcgtgaaaaccgttcgcagcctggcggatatcggtgaagcactgaaaactgttctgaaataaatatctgtaataagaaatagccctcgccgcttccctctacaggaggggcgaagggctgtcggtttcgacatggttggccatcttatgatggccttttttattcgggcactaatctgaaaagtttgcccactgcttttctcccatcttctgcgcaataatgcccggcaaaatatcccctctccgttctgtaaaagcatttatacaagaagaaaattgttctgccggttgctctggccctgatgggtgtaaattcggacgtttatgcggccgatgtaaatatcgatattttaagtgcgacagtgaaagataaacgcattgagggagtatcggtgacgctgcaacgcaatggcgcacaatctgtttctggaaccacaaatgcatcgggcagcgttaatctgggttctacatttgctgatgatcaagatgctttattgatcgtcaaaaaagagggctattctaatctggtggtcaaatgttcgtgtgctggcatgacttatgcgattagtccggcaatgactagtctggatggcatgcgtgtagttttgagctggggcgaaaagccttttgatcttgattcacatttgatcttctctggcggacatatctattttgatagtaaagaggggactgatgctaatctggatgttgatgatacggatagctatggaccagaaactgtcactatcagcaaaaagcattttggcgaaagttacatctatgccgtgcaggactatagcaataaagggttgcccaacagtaattatctctctgccagtaaggcaaaagtgtttgtttatgtagggagctccctggtgcgtagttatagtgtccctgctggaaaacgagggaacatctggaccgtgtttaaactcaatccaaacggcgagtttgaagatatcaactctgttaccagcgccaattttaacgacaccacattagacgtcagggatttagccactgtgataatgcctgcgacggactcttcagctccggcttcgcctgcgatgcaaaacagtggagatactcaactggcaagaaaatataatcgcgaaggtgaagctgtttataaaaccggtcaacttgagcaagccattcaactcttccaacaggcaacagaattagacggcaattacggacaggcatttagtaacctggggctggcgtatcagaaaaatggcaacatagcggaagcaatttaggcaaatcgtaaagcgatctcgttagcctgtggagcaaatgcggcgacaacgcgcgctaactcctattataacattgccaaaatttatggaactgctggacaggacgctgatgcattgcagcattatcaactcgctcttcacgatgccattttataacaatgaaagtggaatcatatttttaaattttatattcttgcttgtttttctggtgaagttatccatcattcactgttctattatcttaaggatgatggaaatagaaggttttttaatgataataaaacatattcttatgttatttaatcacgaattttttaatatgattatgtatcaatacattatattacccgatgtgttactgaattatcgattattactttaatatttagtgatcgtaaacatggttctccagattactaaatttctggcatcttacaatatcatcatcttcaaatagttaaattaagattattgcactgccaaaacagataaattgaagcagtctggtagatattgcagaacaaccttgattccaacggcgaaatcgtatttatcctccaggttgccgtccatatggagttgaatatcattcagtccacgcttgatgagtcgatatcgctatatccatagacagggtagctttttacacgagagtgtccggtgttttctaacgggctggcaatcattccgttttgttgtttcgtatcactgctataacaatttctcttgattttcaatctttgagctaatcattgaatacagatcgggaaatattaataccatatatgttttattttgaaaatccttgttccatctgactatacctaaggtatctatttcttcttgtgattattaccaatgaaacaataagtgacggatttacagtacgttgctcataaagacaacaatcaattaacgttgataaaaatatgttatgtaaaatggcaataaagtagctactctaactaattagtattataaaaagtcgataaagcggctctgttaaataaaatactggttttttatctatatatttccatgtgggtaattttactgtgctattttgttacaataaattaacaataaagttaccagtggctcatgattcacacataattaacatatgtggttgattttgatataaatcaatttttaattcttgaaaaaaatctgcaaaacacgataaattgttgtagatcaaattggtgagatcgtgacaatttcgctataaattgatcactgtcgaaaaatgcaaatttgctcaataaaaacctgtttattgtaaggattttgcggcgtaatataattacgggatcaatttggtttattcattaacacatttgtaacttttttatcattgtcttttcctcttttgatgaaatggcaacgatagaggcgagcaaataattttgtattggggcatgcgtgtgaccctttctaacggggttcactctcggagtcttcatgcgatgagcaaggagtcatgatgttagatatagtcgaactgtcgcgcttacagtttgccttgaccgcgatgtaccacttcctttttgtgccactgacgctcggtatggcgttcctgctggccattatggaaacggtctacgtcctttccggcaaacagatttataaagatatgaccaagttctggggcaagttgtttggtatcaactttgctctgggtgtggctaccggtctgaccatggagttccagttcgggactaactggtcttactattcccactatgtaggggatatcttcggtgcgccgctggcaatcgaaggtctgatggccttcttcctcgaatccacctttgtaggtctgttcttcttcggttgggatcgtctgggtaaagttcagcatatgtgtgtcacctggctggtggcgctcggttcaaacctgtccgcactgtggattctggttgcaaacggctggatgcaaaacccaatcgcgtccgatttcaactttgaaactatgcgtatggagatggtgagcttctccgagctggtgcttaacccggttgctcaggtgaaattcgttcacaccgtagcttctggttatgtgactggcgcaatgttcatcctcggtatcagcgcatggtatatgctgaaaggtcgtgacttcgccttcgctaaacgctcctttgctatcgctgccagcttcggtatggctgccgttctgtctgttattgttctgggtgatgaatccggctacgaaatgggcgacgtgcagaaaaccaaactggctgctatcgaagccgagtgggaaacgcaacctgcacctgctgcctttactctgttcggcattcctgatcaggaagaggaaacgaacaaatttgcgatccagatcccttacgcgctgggcatcattgcaacgcgttccgtggatactccagttatcggcctgaaagaactgatggtgcagcatgaagaacgcattcgtaacgggatgaaggcgtactctctgctcgaacaactgcgttctggttctaccgaccaggccgttcgtgaccagttcaatagcatgaagaaagatctcggttacggtctgctgctgaaacgctatacgccaaacgtggctgatgcgactgaagctcagattcaacaggcaaccaaagactccattccgcgtgtagcgccgctgtactttgcgttccgtatcatggtggcgtgtggcttcctgctgctggcaatcattgcgctctctttctggagtgtcatccgcaaccgcattggcgagaaaaaatggctgctgcgcgccgcgctgtacggtattccgctgccgtggattgctgtagaagcgggctggttcgtggctgaatatggccgccaaccgtgggctatcggtgaagtgctgccgacagctgtggcgaactcgtcactgaccgcaggcgatctcatcttctcaatggtgctgatttgcggcctgtataccctgttcctggtggcagaattgttcttaatgttcaagtttgcacgcctcggcccaagcagcctgaaaaccggtcgctatcactttgagcagtcttccacgactactcagccggcacgctaagacaggagtcgtcaaatgatcgattatgaagtattgcgttttatctggtggctgctggttggcgttctgctaattggttttgcagtcactgacggtttcgacatgggggtgggcatgctcacccgtttcctcggtcgtaacgacaccgagcgtcgaattatgattaactccatcgcaccacactgggacggtaaccaggtttggctgatcaccgcaggcggcgcactgtttgctgcctggccgatggtctatgccgctgcgttctccggcttctatgtggcgatgatcctcgtgctggcgtctttgttcttccgtccggtcggttttgactaccgctccaagattgaagaaacccgctggcgtaacatgtgggactggggcatcttcattggtagcttcgttccgccgctggtgattggtgtagcgttcggtaacctgttgcagggcgtaccattcaacgttgatgaatatctgcgtctgtactacaccggtaacttcttccagctgcttaacccgttcggcctgctggcaggtgtggtgagcgtagggatgatcattactcagggcgcaacctatctgcaaatgcgtaccgtgggcgaactgcacctgcgtacccgtgcaacggctcaggtggcggcactggtgacgctggtctgcttcgcactggctggcgtatgggtgatgtacggtatcgatggttatgtcgtgaaatcgacaatggaccattacgcagcctctaacccgctgaataaagaagtggttcgtgaagctggcgcatggctggttaacttcaacaacacgccaattctgtgggctattccggcactgggtgtggttctgccgctgctgaccatcctgactgcacgtatggataaagccgcgtgggcgtttgtgttctcctccctgacgctggcctgcatcatcctgactgccggtatcgcaatgttcccgtttgtgatgccgtccagcaccatgatgaacgcaagtctgacaatgtgggatgcaacttccagccagctgacgcttaacgtcatgacctgggttgcggtggttctggtaccgatcattctgctctacaccgcctggtgttactggaaaatgttcggtcgtatcaccaaagaagatattgaacgtaacacccactctctgtactaagtaaggagctaaaaatgtggtatttcgcatggattctgggaacgcttcttgcctgttcgtttggggtaatcaccgcgctggcgcttgagcacgtcgaatcaggcaaagccggtcaagaagacatctgatgagtaagattatcgcaaccttgtatgcggtaatggacaagcgccccctgcgggcgctttccttcgtgatggcacttctgttagcaggatgtatgttttgggacccatcacgtttcgccgcgaagaccagtgaactggaaatctggcatggtttactgcttatgtgggccgtctgtgctggtgtgattcacggcgtgggctttcgtccgcagaaggttctctggcaagggattttttgcccattgcttgccgatattgttctcattgtcgggctgattttcttcttcttttaaatcagaattctctttaaaaatttatgggccgagtcaggcccataaatttttacgctcccttaacttgccctcattcccaaacctcaatcgcgcgcgtatagtagcagcgtttaaaagctctaacttttgttgcattaccgggatgtaaagtgaatacaacgctgtttcgatggccggttcgtgtctactatgaagataccgatgccggtggtgtggtgtaccacgccagttacgtcgctttttatgaaagagcacgcacagagatgctgcgtcatcatcatttcagtcaacaggcgctgatggctgaacgcgttgcctttgtggtacgtaaaatgacggtggaatattacgcacctgcgcggctcgacgatatgctcgaaatacagactgaaataacatcaatgcgtggcacctctttggttttcacgcaacgtattgtcaacgccgagaatactttgttgaatgaagcagaggttctggttgtttgcgttgacccactcaaaatgaagcctcgtgcgcttcccaagtctattgtcgcggagtttaagcagtgactgacatgaatatccttgatttgttcctgaaggctagccttctggttaaacttatcatgttgattttgattggtttttcaatcgcatcctgggccattattatccagcggacccgtattcttaacgcagcggcgcgcgaagccgaagcgtttgaagataaattctggtctggaatcgaactctctcgcctctatcaagagagccaggggaaacgggataatctgagcggttcggaacaaatcttttacagcggcttcaaagagtttgtgcgcctgcatcgtgccaatagccatgcgccggaagccgtagtggaaggggcgtcgcgtgcgatgcgtatttccatgaatcgtgaacttgaaaatctggaaacgcacattcctttcctcggtacggttggctccatcagcccgtatattggtctgtttggtacggtctgggggatcatgcacgcctttatcgccctcggggcggtaaaacaagcaacactgcaaatggttgcgcccggtatcgcagaagcgttgattgcgacggcaattggtttgttcgccgcaattccggcggtaatggcttataaccgcctcaaccagcgcgtaaacaaactggaactgaattacgacaactttatggaagagtttaccgcgattctgcaccgccaggcgtttaccgttagcgagagcaacaaggggtaagccatggccagagcgcgtggacgaggtcgtcgcgatctcaagtccgaaatcaacattgtaccgttgctggacgtactgctggtgctgttgctgatctttatggcgacagcgcccatcatcacccagagcgtggaggtcgatctgccagacgctactgaatcacaggcggtgagcagtaacgataatccgccagtgattgttgaagtgtctggtattggtcagtacaccgtggtggttgagaaagatcgtctggagcgtttaccaccagagcaggtggtggcggaagtgtccagccgtttcaaggccaacccgaaaacggtctttctgatcggtggcgcaaaagatgtgccttacgatgaaataattaaagcactgaacttgttacatagtgcgggtgtgaaatcggttggtttaatgacgcagcctatctaaacatctgcgtttcccttgcttgaaagagagcgggtaacaggcgaacagtttttggaaaccgagagtgtcaaaggcaaccgaacaaaacgacaagctcaagcgggcgataattatttcagcagtgctgcatgtcatcttatttgcggcgctgatctggagttcgttcgatgagaatatagaagcttcagccggaggcggcggtggttcgtccatcgacgctgtcatggttgattcaggtgcggtagttgaacagtacaaacgtatgcaaagccaggaatcaagcgcgaagcgttctgatgagcagcgcaagatgaaggagcagcaggctgctgaagaactgcgtgagaaacaagcggctgaacaggaacgcctgaagcaacttgagaaagagcggttagcggctcaggagcagaaaaagcaggctgaagaagccgcaaaacaggccgagttaaagcagaagcaagcggaagaggcggcagcgaaagcggcggcagatgctaaagcgaaggccgaagcggatgctaaagctgcggaagaagcagcgaagaaagcggcggcagacgcgaagaaaaaagcagaagcagaagccgccaaagccgcagtcgaagcgcagaaaaaagccgaggctgctgctgcggcgctgaagaagaaagctgaagcggcagaagcagctgcagctgaagcaagaaagaaagcggcaaccgaagctgctgaaaaagccaaggcagaagctgagaagaaagcggctgctgaaaaggctgcagctgataagaaagcggcagcagagaaagcggcagccgacaaaaaagcagcagaaaaagcggctgctgaaaaggcagcagctgataagaaagcagcggcagaaaaagccgccgcagacaaaaaagcggcagcggcaaaagcagcagctgaaaaagccgctgcagcaaaagctgccgcagaggcagatgatattttcggtgagctaagctctggtaagaatgcaccgaaaacggggggaggggcgaaagggaacaatgcttcgcctgccgggagtggtaatactaaaaacaatggcgcatcaggggccgatatcaataactatgccgggcagattaaatctgctatcgaaagtaagttctatgacgcatcgtcctatgcaggcaaaacctgtacgctgcgcataaaactggcacccgatggtatgttactggatatcaaacctgaaggtggcgatcccgcactttgtcaagctgcgttggcagcagctaaacttgcgaagatcccgaaaccaccaagccaggcagtatatgaagtgttcaaaaacgcgccattggacttcaaaccgtaatcgcgatgttgactgttccgacggtcaacatcaggcaccggttgccacggggttctggtagttttgtgtattttagtttgttaacattctgctaaattatcgtgggccatcggtccagataagggagatatgatgaagcaggcattacgagtagcatttggttttctcatactgtgggcatcagttctgcatgctgaagtccgcattgtgatcgacagcggtgtagattccggtcgtcctattggtgttgttcctttccagtgggcggggcctggtgcggcacctgaagatattggcggcatcgttgctgctgacttgcgtaacagcggtaaatttaatccgttagatcgtgctcgtttgccacagcagccgggtagtgcgcaggaagtacaaccagctgcatggtccgcgctgggcattgacgctgtggttgtcggtcaggtcactccgaatccggatggttcttacaatgttgcttatcaacttgttgacactggcggcgcaccgggtactgtacttgctcagaactcgtacaaagtgaacaagcagtggctgcgttatgctggtcataccgccagtgacgaagtatttgaaaaactgaccggtattaaaggtgcgttccgtacccgtattgcctacgttgttcagactaacggcggtcagttcccgtatgaactgcgcgtatctgactatgacggttacaaccagtttgtcgttcaccgttcaccgcaaccgctgatgtctccggcgtggtcaccagacggttctaaactggcttatgtgaccttcgaaagcggtcgttccgcgctggttattcagacgctggcaaatggcgctgtacgtcaggtggcttcattcccgcgtcacaacggtgcacctgcattctcgccagacggcagcaaactggcattcgccttgtcgaaaaccggtagcctgaacctgtacgtaatggatttggcttctggtcagatccgccaggtaactgatggtcgcagtaacaataccgaaccgacctggttcccggacagccagaacctggcatttacttctgaccaggccggtcgtccgcaggtttataaagtgaatatcaacggcggtgcgccacaacgtattacctgggaaggttcgcagaaccaggatgcggatgtcagcagcgacggtaaatttatggtaatggtcagctccaacggtgggcagcagcacattgccaaacaagatctggcaacgggaggcgtacaagttctgtcgtccacgttcctggatgaaacgccaagtctggcacctaacggcactatggtaatctacagctcttctcaggggatgggatccgtgctgaatttggtttctacagatgggcgtttcaaagcgcgtcttccggcaactgatggacaggtcaaattccctgcctggtcgccgtatctgtgataataattaattgaatagtaaaggaatcattgaaatgcaactgaacaaagtgctgaaagggctgatgattgctctgcctgttatggcaattgcggcatgttcttccaacaagaacgccagcaatgacggcagcgaaggcatgctgggtgccggcactggtatggatgcgaacggcggcaatggcaacatgtcttccgaagagcaggctcgtctgcaaatgcaacagctgcagcagaacaacatcgtttacttcgatctggacaagtacgatatccgttctgacttcgctcaaatgctggatgcacatgcaaacttcctgcgtagcaacccgtcttacaaagtcaccgtagaaggtcacgcggacgaacgtggtactccggaatacaacatctccctgggtgaacgtcgtgcgaacgctgttaagatgtatctgcagggtaaaggcgtttctgctgaccagatctccatcgtttcttacggtaaagaaaaacctgcagtactgggtcatgacgaagcggcgtatgccaaaaaccgtcgtgcggtactggtttactaagagaattgcatgagcagtaacttcagacatcaactattgagtctgtcgttactggttggtatagcggccccctgggccgcttttgctcaggcaccaatcagtagtgtcggctcaggctcggtcgaagaccgcgtcactcaacttgagcgtatttctaatgctcacagccagcttttaacccaactccagcaacaactctctgataatcaatccgatattgattccctgcgtggtcagattcaggaaaatcagtatcaactgaatcaggtcgtggagcggcaaaagcagatcctgttgcagatcgacagcctcagcagcggtggtgcagcggcgcaatcaaccagcggcgatcaaagcggtgtggcggcatcaacgacgccgacagctgatgctggtactgcgaatgctggcgcgccggtgaaaagcggtgatgcaaacacggattacaatgcagctattgcgctggtgcaggataaatcccgccaggatgacgcaatggtggcatttcagaatttcatcaaaaattaccctgattcaacttacctgccaaacgccaattattggctgggtcagttaaactacaacaagggtaaaaaagatgatgcggcggtattattttgcttcggtagtgaaaaactatccgaagtcaccgaaggctgcagatgcgatgtttaaagtcggcgtcatcatgcaggacaaaggtgacaccgcaaaagcgaaagccgtataccagcaggttatcagtaaataccctggtactgatggcgctaaacaggcgcaaaaacgtctgaacgcgatgtaatgcataacacacgaccagaagtcgcattatttctggtcgtgtcgtgcgaatcataagcagttgagtgatctgcatcgaaatttttgttgcgctcaagtctgaaatcagtaatatatgccgccgttgccacgggatatcaaacaaaccgaaagcaacgaaaaagtgggtcgttagctcagttggtagagcagttgacttttaatcaattggtcgcaggttcgaatcctgcacgacccaccactaacatagttagttgtagtatccagcgtagtatcgggtgattagctcagctgggagagcacctcccttacaaggagggggtcggcggttcgatcccgtcatcacccaccaccgggtcgttagctcagttggtagagcagttgacttttaatcaattggtcgcaggttcgaatcctgcacgacccaccactaattactgtgggttcggtggaagtagtttgtagtatccagcgcagtatcgggtgattagctcagctgggagagcacctcccttacaaggagggggtcggcggttcgatcccgtcatcacccaccactcgggtcgttagctcagttggtagagcagttgacttttaatcaattggtcgcaggttcgaatcctgcacgacccaccaattttaaacattggttccgagtagaaatctttcaggtaacacccgtatgggtcgttagctcagttggtagagcagttgacttttaatcaattggtcgcaggttcgaatcctgcacgacccaccatcctgaatgattaaagcagcataatcccgcaaggggtcgttagctcagttggtagagcagttgacttttaatcaattggtcgcaggttcgaatcctgcacgacccaccaatgcaaaaaagcgccctaaaggcgcttttttgctattcaggcatctctcaatttcaattcttgaccctgatgacatactccgcgtttgctgcgtaaacaactctacgtcggaggaataagacgcaaagtgtggcattcggcatctcatacgtaattcgagtgacttttctccaccattcgactatcttgtttagcatataaaacaaattacgccgataatagcgaatatcacgcttaagtcggttttaacgttaagcctgtaaaacgagatggtaagatgagcgtgatgtttgatccagacacggcgatttatcctttccccccgaagccgacgccgttaagcattgatgaaaaagcgtattaccgcgagaagataaaacgtctactaaaagaacgtaatgcggtgatggttgcccactactataccgatcccgaaattcaacaactggcagaagaaaccggtggctgtatttctgattctctggaaatggcgcgcttcggtgcaaagcatcccgcttctacgttgttagttgctggggtgagatttatgggagaaaccgccaaaattctcagtccggaaaaaacaattctgatgccgacactacaggctgaatgttcactggatctcggctgccctgttgaagaatttaacgcattttgcgatgcccatcccgatcgtactgtcgtcgtctacgccaacacttctgctgcggtaaaagcgcgcgcagattgggtggtaacttcaagcattgccgtcgaacttattgatcatctggatagtttgggtgaaaaaatcatctgggcacctgacaaacatctggggcgttacgtgcaaaaacagacgggcgcagacattttatgctggcagggtgcctgcattgtgcatgatgaatttaagactcaagcgttaacccgcttgcaagaagaatacccggatgctgccatactggtgcatccagaatcaccgcaagctattgtagagatggcggatgcggtcggttccaccagtcaactgatcgctgctgcgaaaacattgccacatcagcggcttatcgtggcaaccgatcggggcattttctacaaaatgcagcaggcggtgccagataaagagttactggaagcaccaaccgcgggtgagggcgcaacctgtcgcagctgcgcgcattgcccgtggatggccatgaatggccttcaggccatcgcagaggcattagaactggaaggaagcaatcacgaggtttatgttgatgaaaggctgcgagagagggcgctggtgccgctcaatcgtatgctggattttgcggctacactacgtggataattgataataaggcgtcacattacgctttgggggaacgatggatttttttagtgtgcagaatatcctggtacatataccaataggggcaggcggttatgatctctcatggatcgaagcggtaggcacgatcgccgggttgctgtgtattggccttgccagtctggagaagatcagtaactacttctttggcctgatcaacgtcactttgtttggcattattttctttcagattcagctgtatgccagcctgttattacaggtgtttttctttgccgcgaatatttacggctggtatgcgtggtcgcgacaaaccagtcagaacgaggcggagttgaaaattcgctggttgccattgccgaaggcgctaagctggctggcggtttgcgttgtttcgattggtctgatgacggtatttatcaatccggtgtttgcatttttgacccgcgtggcagtcatgatcatgcaagcattaggattacaggttgcgatgcctgaactacagccggacgctttcccgttctgggattcatgcatgatggtgttatctatcgtggcaatgattctgatgacgcgtaagtatgtggaaaactggctgttgtgggtgattattaacgtgattagcgtcgttatttttgcacttcagggcgtttacgccatgtctctggagtacatcatcctgacctttattgccctcaacggcagccggatgtggatcaacagcgcacgcgaaagaggttcacgcgcgctgtcccattaatggtgatgatgtgaatggccagacaccccttcattcaggtggcagtctggcccatgacaaggttgatattccatctgaatagtggcgtgctcaatctgatagtgatccatcaggtagtgttggatctgatctaacaaggcatcgtgatcgtgtggcgggatcacctgcacatgcagcgtcatcaccggcttctcgcctaccatccatacatgcacatggtgcacattgcggacttccgggatttcccggcacaagcgacgcttcagttcagcgatatccagcgataccggtgcaccttcaagtaattcattcacactatctttcaacagtcgccacgcgctacgcagaaccagaagcgacaccagtatgagtgtgagtgcgccatgacgagtcatcccttaattattctcacttaactttatgacatcatactgcttttagaagggaaaaattaaaagggagagactccgctctcccattattggctatttcgcagggttactgcgtggtaccgtcggttttggtatcgacatcattgttgatgccatcaccggtttggacttttttattgatatccgggcagcgaccatctttgcacatggtgttcttgtgctcttcatctttggtcatgccgtcattgttcattgaagaaccatccggatgcagcattgtgccgccagaaccggtatttaccccgttattgtcgacgttatttggcgcgacattttcacgggcatcaggggctacctggcccgcatcagctgcggcgtttgcctggccgttattgctttgcgctccgctatcggcagccagtgcggcaccgctggcaaggcttagagtggcagtcaaaaatagtgtggccagttttgtcattttcataggatgctcctgttatggtcgttatgtcggataacctcttccaacagtgcatttgcaggtgaatataaggcaatggtttaagatttcagccaggcaaagatacccagcagagaatcttgaaataattaacaaacaaaggagttacagttagaaattgtaggagagatctcgtttttcgcgacaatctggcgtttttcttgctaattccaggattaatccgttcatagtgtaaaaccccgtttacacattctgacggaagatatagattggaagtattgcattcactaagataagtatggcaacactggaacagacatgaattatcagaacgacgatttacgcatcaaagaaatcaaagagttacttcctcctgtcgcattgctggaaaaattccccgctactgaaaatgccgcgaatacggtcgcccatgcccgaaaagcgatccataagatcctgaaaggtaatgatgatcgcctgttggtggtgattggcccatgctcaattcatgatcctgtcgcggctaaagagtatgccactcgcttgctgacgctgcgtgaagagctgcaagatgagctggaaatcgtgatgcgcgtctattttgaaaagccgcgtactacggtgggctggaaagggctgattaacgatccgcatatggataacagcttccagatcaacgacggtctgcgtattgcccgcaaattgctgctcgatattaacgacagcggtctgccagcggcgggtgaattcctggatatgatcaccccacaatatctcgctgacctgatgagctggggcgcaattggcgcacgtaccaccgaatcgcaggtgcaccgcgaactggcgtctggtctttcttgtccggtaggtttcaaaaatggcactgatggtacgattaaagtggctatcgatgccattaatgccgccggtgcgccgcactgcttcctgtccgtaacgaaatgggggcattcggcgattgtgaataccagcggtaacggcgattgccatatcattctgcgcggcggtaaagagcctaactacagcgcgaagcacgttgctgaagtgaaagaagggctgaacaaagcaggcctgccagcgcaggtgatgatcgatttcagccatgctaactcgtcaaaacaattcaaaaagcagatggatgtttgtactgacgtttgccagcagattgccggtggcgaaaaggccattattggcgtgatggtggaaagccatctggtggaaggcaatcagagcctcgagagcggggaaccgctggcctacggtaagagcatcaccgatgcctgcattggctgggatgataccgatgctctgttacgtcaactggcgagtgcagtaaaagcgcgtcgcgggtaaagtttaattgtcggatgcgccgtcagagtggcgtatccgattaatcaccggaggcctgataaaacgcgcagcgtcgcatcaggcaatgtgctccattgttagcaacgacaaacaaaaaagccgactcacttgcagtcggctttctcatttttaaacgaatgacgtttacttcgctttaccctggttagcaaccgccgctgctttcgccgcgatctcgtcagcattacccagataatagcgtttcagcggtttgaagttctcgtcaaactcataaaccagcggcacgccggtcgggatattcagctcaagaatctcttcttcgctcatgttatcgagatatttcaccagcgcacgtaacgagttaccgtgtgcggcgatgatgacgcgctcaccgctcttcatacgtggcagaatggtttcattccagtaagggatcacgcggtcaatggtcagcgccaggctttccgtcagcggcagctctttctcgctcagtttcgcgtaacgcggatcgtgccccggataacgctcatcatctttagtcagttccggcggagtcaccgcaaaaccacgacgccactgtttcacctgctcgtcgccatacttttcagcggtttccgctttgttcagaccctgcaacgcaccgtagtgacgttcgttcagtttccaggatttctcaacgggcagccatgcctgatccagttcgtccaacacattccacagggtatgaatagcgcgtttcagcacagaggtgtaagcaaagtcaaagctgtaaccttcctctttcagcagcttacctgctgcttttgcttcgcttacgcctttctcagacagatccacgtcgtaccaaccggtgaaacggttttctttgttccactgactttcgccatgacgaaccagaaccagcttagttacagccatatacttactcctcaaatcatcttttaatgataataattctcattatattgccgtgacgaagcaacagcaatgcttacgcataaccatagcgaaaatagtgtcgcagtgtaaggttgttgtgaatattgagttgcaaatatgtcggtgtttgctggtgatttgaacaatatgaagataaagccctcatgacgagggcttaacattactgagcaataaactgatattccgtcaggctggaatactcttcgccaggacgcaggaagcagtccggttgcggccattcagggtggttcgggctgtccggcagaaattcgctttccagagccagcccttgccagtcggcgtaaggttcggttccccgcgacggtgtgccgccgaggaagttgccggagtagaattgcagagccggagcggtggtgtagaccttcagctgcaatttttcatctgctgaccagacatgcgccgccactttcttgccatcgcctttggcctgtaacaagaacgcgtgatcgtaacctttcactttgcgctgatcgtcgtcggcaagaaactcactggcgatgattttggcgttgcggaaatcaaaagaggttccggcgacagatttcaggccgtcgtgcggaatgccgccttcatcaaccggcagatattcttccgccagaatctgcaacttgtgattgcgcacgtcagattgctcgccgtcaagattgaaatagacgtgattagtcatattcaccgggcaaggtttatcaactgtggcgcgataagtaatggagatacggttatcgtcggtcagacgatattgcaccgtcgcgccgagattacccgggaaaccctgatcgccatcatctgaactcagggcaaacagcacctgacgatcgttctggttcacaatctgccagcgacgtttgtcgaacccttccgggccgccatgcaattggttgacgccctgacttggtgaaagcgtcacggtttcaccgtcaaaggtataacggctattggcgatgcggttggcataacgaccaatagaggcccccagaaatgcggcctgatcctgatagcattccgggctggcgcagccaagcagcgcctcgcggacgctgccatcggaaagcggaatacgggcggaaagtaaagtcgcaccccagtccatcagcgtgactaccatccctgcgttgttacgcaaagttaacagtcggtacggctgaccatcgggtgccagtgcgggagtttcgttcagcactgtcctgctccttgtgatggtttacaaacgtaaaaagtctctttaatacctgtttttgcttcatattgttcagcgacagcttgctgtacggcaggcaccagctcttccgggaacaacgcgacgatacagccaccaaatccgccgccggtcatgcgtacgccacctttgtcgccaatcacagctttgacgatttctaccagagtgtcaatttgcggtacggtgatttcgaaatcatcgcgcatagaggcatgagactccgccatcaactcgcccatacgtttcaggtcgccttgctccagtgcgctggcagcttcaacggtgcgggcgttttcagtcaggatatgacgcacgcgtttcgccacgattgggtccagttcatgcgcaacagcgttgaactcttcaatggtgacatcgcgcagggctggctgctggaagaaacgcgcaccggtttcgcactgttcacgacgggtgttgtattcgctgccaaccagggtacgtttgaagttactgttgatgatgacgacagccacacctttgggcatggaaactgctttggtccccagtgagcggcagtcaatcagcaaggcatgatctttcttgccgagtgcggaaatcagttgatccatgattccacagttacagcctacaaactggttttctgcttcctgaccattaagcgcgatttgtgcgccgtccagcggcagatgataaagctgctgcaatacggttccgaccgcgacttccagtgaagcggaagaacttaaccctgcaccctgcggcacattgccgctgatcaccatgtccacaccgccgaagctgttgttacgcagttgcagatgtttcaccacgccacgaacgtagttagcccattgatagttttcatgcgcgacaatgggcgcatcgagggaaaactcgtcgagctgattttcataatcggctgccattacgcgaactttacggtcatcgcgtggcgcacagctgatcacggtttgataatcaatcgcgcagggcagaacgaaaccgtcgttgtagtcggtgtgttcaccaatcaaattcacgcggccaggcgcctgaatggtgtgagtggcagggtagccaaatgcgttggcaaacagagattgtgttttttctttcagactcatttcttacactccggattcgcgaaaatggatatcgctgactgcgcgcaaacgctctgctgcctgttctgcggtcaggtctcgctgggtttctgccagcatttcataaccaaccataaatttacgtacggtggcggagcgcaacagaggcggataaaagtgcgcgtgcagctgccagtgttgattctcttcgccattaaatggcgcgccgtgccagcccatagagtaggggaaggagcactggaagaggttgtcataacgactggtcagctttttcaacgccagtgccaaatcgctgcgctgggcgtcggtcaaatcggtgatccgcaaaacgtgggctttgggcagcagtagcgtttcgaacggccaggcagcccagtaaggtacaacggctaaccagtgttcggtttcgacaacggtacggctaccgtctgccagctcgcgctgaacataatccaccagcattggcgatttctgttcggcgaaatattctttttgcagacggtcttcgcgctcagcttcgttaggcaggaagctatttgcccaaatctgtccgtgcggatgcgggttagagcagcccatcgccgcgcctttgttttcaaagacctgcacccatgggtacgtttcccccagctctgcggtttgctcctgccaggttttgacgatttccgtcaatgccgcaacgctcagttctggcaacgttttactgtgatccggtgaaaagcagatcacccggctggtaccgcgcgcgctctggcaacgcattagcggatcgttgctttctggcgcatctggcgtgtcagacatcaaggccgcaaagtcattagtgaaaacgtaagtcccggtgtaatcggggtttttatcgcctgtcacccgcacattacctgcgcagaggaagcaatctggatcgtgcgcaggtaacacctgtttggctggcgtttcctgcgccccctgccaggggcgcttagcgcggtgcggtgaaaccagaatccattgcccggtgagcgggttgtagcggcgatgtggatgatcaacgggattaaattgcgtcatggtcgttccttaatcgggatatccctgtggatggcgtgactgccagtgccaggtgtcctgcgccatttcatcgagtgtgcgcgttacgcgccagttcagttcacggtcggctttgctggcgtccgcccagtaggccggaaggtcgccctcgcgacgcggtgcaaaatgataattaaccggtttgccgcaggctttgctgaaggcattaaccacgtccagcacgctgctgcctacgccagcgccgaggttatagatgtgtacgcctggcttgttcgccagtttttccatcgccacgacgtgaccgtccgccagatccattacgtggatgtaatcgcgcacgccagtaccgtcttcggtcggataatcgttaccaaaaatcgccagcgagtcgcgacggcctacagcaacctgggcgatgtatggcatcaggttattcggaatgccttgcggatcttcgcccatatcgcccgacggatgcgcgccaactgggttgaagtagcgcagcagggcaatgctccagtccggctgggctttttgcagatcggtgaggatctgttccaccatcagcttgcttttgccgtaagggctttgcggtgtgccggtcgggaagctttcaacatatggaattttgggctgatcgccataaacggtggcggaggagctaaagataaagtttttgacgttagcggcgcgcatggcgctaatcaggcgcagggtgccgttgacattgttgtcgtaatattccagcggtttttgtaccgattcgccaacggctttcagcccggcgaagtggatcacggtgtcgatagcgtgatcgtgcaggatctcggtcatcaacgcttcgttacgaatatcgccttcaacaaacgttggatgtttgccgcctaaacgctcgataacaggcagtacgctgcgcttactgttacagaggttatcaagaatgatgacatcatgaccgttttgcagtaattgcacacaggtatgacttccaatgtaaccgctaccaccggtaaccagaactctcataattcgctccattaggcttatggtatgaaataaccatagcataacaaagatgcgaaaagtgtgacatggaataaattagtggaatcgtttacacaagaatttagccgtttttaatgtgcgattaagtgattataaaacagagggtttatgaatgattgcgctttttatctgaaaaaaagacgcggtttcatgcctgcatgcgtcaaaccgttggccggataacacgtttacgccgcctccggcacggtcagcactaccgactcagtttatttttgtcagcgcatagcgataaaagtcaccgtccggcacgaactcaagacgatgggtaatacaggcaggcgcatcttcagcgtggtgcgaaacaaacaacaattgcgtttcaccttcgctaatcagcacatcaacaaaccggcggataagctggcgattgagcggatcaagcccctgtagtggttcatcgagaataagcaacgtcggatgtttcaccagcgcgcggacgatcagcgccagacgctgctgtccccaggaaagactatggaacggagcgtcagccgtgcgtttatcaatgccgagaacatccagccactgctgcaccagtttttgctggcgatccgaaacggcctgataaatgccaatcgaatcaaaatagccagaaaggatcacattacgcacagtagtgctgacccggtaatccagatgcaaactactgctgacgtaaccgatatgctttttgatatcccagatggtttcgccgctgccgcgacgtcgtccgaaaagcgtcaaatcgttgctgtaaccttgcggatgatcgccagtaatcaggcttaataacgtcgattttcccgcgccatttggcccgacaatttgccagtgttcgcctggattcacctgccagctaaggttattaagaatggggcgttcgttataagaaaccacgccattgttcagcacaatgcgcggttcgttggcgggtaaggcgtgacgtgctgaaggttcatccggctccggcagttgcacaccttcaagctgttcgctatgcgccagttgcgcaacgagtgcttgttggagcagttcttctttagcgccagtttccgctaacgtgcaatccgccagcacgccagcaaactggacaaattctgggatctcatcgaagcgattgagcaccaataccagagtaataccggactgatgtaacgaggcgagtagctcagccagctgctgacgtgaggcaacatccaggccatcgaacggctcatcaagaatcaacaagtcaggctccgacatcagcgcctgacacagcagggtttttcgcgtctcgccagtggaaaggtatttaaagcgtcggtcgaggagggcggtaataccgaactgctgcgccagttgcatgcaacgcggagtatcctttacttcatcctgaatgatctcagccgtggtacgcccggtgtcatcttcgccagggccgagcatatcggtgttattccgctgccattcgtcgctgacgagcttttgcaattgctcgaaggagagacgagtgatgtgggaaaactggctttgccgttcacctttcaaaagcggaagttcccccgacagcgcgcgggccagcgccgatttcccgcttccattcgaaccgacaaacgcccaactatcacccgcgtttaacgttagccgaggcaattgcagcgtttttgtgttgccaagacgaaacgtgccttgcaaaatttgcaacgatgacattttatatcccattttgtgcagcgattactgacagggatacgtgtttcataacaaattgtcaacacgcttagcacagcgtggcgataatcacgctgtcggcattaaagtaggccgtgacattctgtccttgctgaagagaagtcgcttcatttaccggcactgtggcgcacagtgtttgcccgtcgggtagcgccattaatacttcgcactgctctgcgccgcgctcaatatgactaataatacctggtaattggttgtcagcgttttgcgcgaccgcatcgtcctgagtaatacctacccacggcgcttttagcaatatcaacacttctttgccttcatccagccccagacgcgcgccgctttgtgcggtaactgcgactttcaggcgtgtttttccatcagccagtaagacatcaacatgctgttgaacgtcatcatgatcgcgggcggtgatggtaccgaaccactggttacgggcgctggtttgcagtgaaaaacgtgagatcgcggccagcaggctgttcagcggcagggcgtcatcgtcacttaacacatcaaaggctttttgctggatttgcgccagtaagtcatagagttgaatcagtcgctgaccatagcgggtcagtactgcgccgcctccacctttaccgcctgttgcgcgctcaaccagaatatgctcacttaactgattcatctcgttaatggcatcccaggcgcttttatagctgataccggcatctttcgctccctggctaatggaaccggaaagcgcaatgtgttttagtagcgaaatgcggcgcgggtcggcgaataatttttgttggagcttaagggtgagaaggatttcggcctgcataacaatgtcctggcaaaagtcttattgtgacggaaaacgaacgccacgcaaagctgaccgcacaaaaggggagtgcttttctgtgcttagcggttagaatagtctcatgactatatctggagttgaccatgttagagttattaaaaagtctggtattcgccgtaatcatggtacctgtcgtgatggccatcatcctgggtctgatttacggtcttggtgaagtattcaacatcttttctggtgttggtaaaaaagaccagcccggacaaaatcattgattccctgaatgcccgcttagtcgggcattttctttttctcaacttcctgctttttctgccgatattttttctcatctacctcacaaaggttagcaataactgctgggaaaattccgaacttgccgttatattgacgcctacataacgttagattaaggggttaccaatggctcgtaaatggttgaacttgtttaccggggcggcactctctttcgctgttgctggcaatgcactggcagatgaagggaaaatcacggtgttcgccgccgcatcactgactaacgcaatgcaggacattgctacgcagtataaaaaagagaaaggcgtggatgtagtttcttctttcgcttcgtcatctactttggcccgtcagattgaagcgggtgcgcctgcggatctgtttatttctgccgatcagaaatggatggattatgcggttgataaaaaagcgatcgatacggcttcgcgccagacactgctcggcaatagcctggtcgttgtagcaccgaaagccagcgagcagaaagatttcaccatcgacagcaaaaccaactggacttcgctgctgaatggcggtcgcctcgcggttggtgatccggaacatgtccctgctggcatttatgcgaaagaagcactgcaaaaactgggcgcatgggatacgctctccccgaaactggctccggcggaagatgttcgtggcgcgctggcgttggtcgaacgcaatgaagcgccgctgggtattgtttacggttctgacgcagttgccagcaaaggggtaaaagtggttgccaccttcccggaagattcacataaaaaagtggaatatccggttgctgttgtggaagggcataacaatgcgacagtgaaagcattttacgattatctgaaggggccgcaggctgcggaaatctttaaacgttacggatttacaaccaagtaatgatactgaccgatccagaatggcaggcagttttattaagcctgaaagtttcttccctggctgtgctgtttagcctgccgtttgggatcttttttgcctggttactggtacgttgcacgtttccgggcaaagctctgctcgacagcgtactgcatctaccgctggtgttaccgcccgtggtcgtcggttacctattattagtttcgatgggacggcgcggatttatcggtgaacgtctgtatgactggtttggtctttctttcgcgtttagctggcgtggtgcggttctcgctgccgctgtcatgtcttttccgctgatggtgcgggcgattcgtctggcgctggaaggtgttgatatcaaactggagcaggccgcaagaacactgggggccgggcgctggcgcgttttctttactatcacgttaccgctgaccttaccgggaattattgttggtacggtgctggcattcgctcgttcgctcggtgaatttggcgcaaccatcacctttgtttctaacattcctggtgaaacgcgaaccattccttctgccatgtataccctgatccagacccctggcggggaaagtggcgcggcgagactgtgtattatttctattgcgctggcgatgatctccctgttgatttcagaatggctggccagaatcagccgtgagcgggcggggcgctaatcatgctggaactgaatttttcccagacgttgggcaatcattgcctgacgattaatgaaacgctgcccgccaatggcatcaccgctatttttggtgtctctggtgccggaaaaacctcgctgattaacgccatcagtgggctgacacgtccgcaaaaagggcggattgtcctcaatggtcgggtactaaatgacgccgataaaggtatctgcctgacgccagaaaagcgtcgcgtaggctatgtgtttcaggatgcgcggctgtttccgcattataaagtgcgtggcaatttgcgctacggcatggcgaaaagcatggtcaatcagttcgataagctggtggcgcttttaggcattgaaccgttgcttgatcgtttaccaggcagcctgtccggaggcgaaaaacagcgcgtggcgattggtcgggctttgctgacagcaccggaattgctgttgctggatgaaccgctggcgtcactggatattccgcgtaaacgcgaactgttgccttatctgcaacgtctgacgcgggaaatcaacattccgatgttgtatgtcagccattcgctggatgagatcctccatctggcagacagagtgatggtactggaaaacggtcaggtgaaagcctttggcgcgctggaagaagtctggggtagtagcgtgatgaatccgtggctaccgaaagagcaacaaagtagcattctgaaagtgacagtacttgagcatcatccgcattacgcgatgaccgcgctggcgctgggcgatcagcatttgtgggtcaataagctggaagaaccgctgcaagctgcgctacgcatccgcattcaggcttccgatgtctcgctggttttacaaccgccgcagcaaaccagcattcgtaacgtattgcgggcaaaagttgttaatagttatgacgacaacggccaggtggaagtggagctggaagtcggcggtaaaacgctgtgggcgcgtatcagcccgtgggccagggatgaactggcgatcaaacctggcctgtggctgtatgcgcaaattaaaagtgtgtcgataaccgcctgattaaatcaggtagctataaatgaactgggcaatgctgtcggtggtgttatcaccaatcacaatgttggcgcgcgcttttactgcgtcatcggcgttgcccatcgccacgcctgtaccagcggcttccagcatactaatatcattgaagttatcgccgaacgccacgacgttttccatcgaccagccttgtgcctcaacccatttcgtcaaacgtttacctttgctgttgccgccgcgtgcaatatcaacctgatcgtgccaggaccattcacactccagtcccagttcatgttcgacatgcttaccaaaatgctgcaattgcggcaggtcatcgtgcgtcagggcgaacttccatacggcgttaacttgttgcgccgtttcagccagagaagcgacttgtgtgaaagtcggacgctgttccggcggcagggtttgcgcccagttagacgtgcgaatgacatgcccggtcgggtgctcatagaccattgcatcatcgacatacatcagaccgtgaatgtggtgttcattcagcatctcaatgagttgcagggctttattaacgggcattgggtccgcttccagcacggtttttgcatgataatcatacaaataggtgccattacagcaaatagcaggtgtatccagcgccagcgcctgataaaaaggatgaatagcgacgtgatggcgacctgtgacgatgattaattgatagcctgcttcgcgagcgcgggccagggcttctatcgatgatggaagcaaggtctttttcggggtcaataaggtgccgtctaagtcgagagcaatcacgcgtgtggtcatggcgtattccagattaaggttaagaattttcgtctgcgcgaatggtacaccgataccactatcggacaaaattctgcgttttaattcagcattcaccgccaaaagcgactaattttagctgttacagtcagttgctaaatgcaaaggagcattcatgaagcaaacagtttatatcgccagccctgagagccagcaaattcacgtctggaacctgaatcatgaaggcgcactgacgctgacacaggttgtcgatgtgccggggcaggtgcagccgatggtggtcagcccggacaaacgctatctctatgttggtgttcgccctgagtttcgcgtcctggcgtatcgtatcgccccggacgatggcgcgctgacctttgctgcagagtctgcgctgccgggtagcccgacgcatatttccaccgatcaccaggggcagtttgtctttgtcggttcttacaatgcgggtaacgtgagcgtaacgcgtctggaagatggcctgccagtgggcgtcgtcgatgtggtcgaggggctggacggttgccattccgccaatatctcaccggacaaccgtacgttgtgggttccggcattaaagcaggatcgcatttgcctgtttacggtcagcgatgatggtcatctggtagcgcaggaccctgcggaagtgactaccgttgaaggggccggcccacgccatatggtattccatccaaacgaacaatatgcgtattgcgtcaatgagttaaacagctcagtggatgtctgggaactgaaagatccgcacggcaatatcgaatgtgtccagacgctggatatgatgccggaaaacttctccgacacccgttgggcggctgatattcatatcaccccggatggtcgtcatttatacgcttgcgaccgtaccgccagtctgattaccgttttcagcgtttcggaagatggcagcgtgttgagtaaagaaggcttccagccaacggaaacccagccgcgcggcttcaatgttgatcacagcggcaagtatctgattgccgccgggcaaaaatctcaccacatctcggtatacgaaattgttggcgaggaggggctactgcatgaaaaaggccgctatgcggttgggcaggggccaatgtgggtagtggtcaacgcgcactaaccgctgatttaaccggcgcagtctctcctgcgccggtgtattaacctatctcctgtaacgcatgtctctggcgttcgacgatattggtccacaaattgtctttatcgtcagtccacaaattaatcagcaaggcaaaaaagcgttcagctgccggagaaagcacggcatctttgcggcgaataatccccaatgtccgacgtataacgggttccaccagtgggataccaataatcgaagaatagggcgcatggggcattgccagaccaggaagcgccgaaatccccagtcccgcctccaccagccctaatgacgtcgaaagatgacgcacttcgtaaaaccagtccagcttccagggcttgtcggctagctgttgttctatcaatagtcggttgccgctggaggagcgtacgccaatcattttgtaacccactaactcctgccattctacaagctgctttttggccaatggatggtcacgccgacaggccagcacgaacggctcgttgaccagtggggtaaaatcaatggatgaatttgtgacgttgttcatgtttatgccaaagtctgattcgttacacagcaccgattccatgcaattattcgtgccttgttccagaatccgcactttaatattgggatacagctcattaaatttaccgattgccagcggtaaaaaataaaatactgcggtcggaatacacgctaacgtcaccataccacgatgataagcattcatatcacgaatattaaaaagcgtttcatcgaatttttttattaattcccgcgcctccgggagcaacctttttcctgcttttgttaacgtaaccttgcgagttgtacgctcaaatagttgaatgtgtaaatcttcctccattttttttattcttcgcgttaatgcaggttgcgtaatattgagtaatttagcagcattgttaaatgaactggactctgccagtatgacaaatgccttcatacttgataattcatgcttcattattactccggaaaatggaagcgacgattttgggtgactggcagttaaaaattttaactgcatttagccaacttaaattaatgaaaaaatgttattaatcgttgagctaaagtcattagagatgctttgcccttaatgtaaccatatcgcaataagttatgtttttaaattgagggcattattatgaaaaaaataccctgcgtgatgatgcgaggtggaacctcgaggggcgcgttcctgttagcggaacatctacccgaagatcaaacgcagcgcgataaaatattgatggcaattatgggttccggtaacgatctggaaattgacggtattggcggcggtaatccgctgaccagtaaagtcgccattattagccgctccagcgatccgcgtgcagatgtcgattatctgtttgctcaagttatcgtccatgagcaacgtgtcgataccacgcctaactgcggcaatatgctgtctggcgttggggcattcgccattgaaaatggtttgattgcagcgacttcgccagttacccgcgtacgtatccgcaacgtcaatacgggtacgtttatcgaagctgatgtgcaaacgccaaatggtgttgtcgagtacgagggtagcgccagaattgacggcgtaccgggtactgccgcaccggttgcgctcactttcctgaatgccgccggaacgaaaaccggaaaagtcttcccgactgataatcagattgattattttgacgatgtcccggtgacctgtatcgatatggcgatgccagttgtcattattcctgctgaatatctgggaaaaacaggctatgaattaccggcagagctggatgccgacaaagcattattagcccgcattgaatctatccgtctacaagcgggtaaagcaatgggcttaggcgatgtcagtaatatggttatccctaaacctgtacttatttctccagcgcagaaaggcggggcaattaatgtgcgttattttatgccgcattcttgccatcgcgctttggcgataaccggtgctattgctatttccagtagttgtgcattggaaggtaccgtcacccgacaaatcgtcccttctgtaggatacggcaatatcaatattgaacaccccagtggtgcgctcgacgttcatttaagtaatgaaggtcaggatgccacgacgttacgcgcatctgttattcggacgaccagaaaaatattttccggtgaagtttatcttccctgaaaaattttgttgtcgtgataatgatactcaataaaggaattctgtatgagtcatacagaaagaacaggatattaaatgaataaaaaatcgttatggaagctaattctgatattagcgatcccatgtattattggctttatgccagctccggcaggattaagcgaactggcgtgggtgctttttggtatttacctggcggccattgtggggctggttatcaagcctttcccggaacctgtcgtactgttaattgccgtcgccgcatcgatggtagtggtgggtaacttatcaggtggggaatttaaaaccaccgccgtattaagcggttactcttccggtaccacctggctggtgttttctgcgtttactttaagcgccgcgtttgtaaccacaggcttaggtaaacgtattgcctatctgctgattggtaaaattggtagcactaccctgggtctgggttacgttacggtatttctcgatctggtactggctccggcaacaccgtctaacaccgcgcgtgcgggcggcatcgtgttaccgatcatcaacagcgtggcagtggctttgggatcagaaccggaaaaaagtccgcgtcgtgttggacattacctgatgatgtccatttacatggtcactaaaaccaccagctatatgttctttaccgcaatggcggggaacattctggcgctgaaaatgatcaacgacattctgcacctgcaaattagctggggtggatgggcgctagccgccggattgccgggcatcattatgctgctggtcaccccgctggtgatttacaccatgtatccaccagaaattaagaaggtggataacaaaaccatcgctaaagcgggccttgccgaactgggaccgatgaaaatccgcgaaaaaatgctgctcggtgtctttgtgctggcgctgctgggctggattttcagtaagtctctgggggttgatgaatccaccgtggcaatcgttgttatggcaactatgctgctgctgggtatcgttacctgggaagacgtggttaaaaataaaggcggctggaataccttaatctggtacggcggtattatcggcttaagctccttattatcgaaagttaaattcttcgaatggttagctgaagtctttaaaaataacctggcatttgatggtcacggtaacgttgctttcttcgttattattttcctcagcatcatcgtgcgttatttcttcgcttctggtagtgcctatatcgttgccatgttaccggtatttgccatgctggcgaatgtctccggcgcaccgttaatgttaaccgcgctggcactgttgttctctaactcctatggcggcatggttactcactatggcggcgcggcaggtccggtcatctttggcgtgggttacaacgatattaaatcctggtggttggtcggtgcggtactgacgatattaaccttcctggtacatatcaccctcggcgtgtggtggtggaatatgctgatcggctggaacatgctgtaaatatactcgtcatacttcaagttgcatgtgctgcgtctgcgttcgctcaccccagtcacttacttatgtaagctcctggggattcactcgcttgtcgccttcctgcaactcgaattatttagagtatatccatttattatctttctgcgcacttcacggtgcgcagatatctggagcatttgatgatcaagttatctgaaaaaggcgtgtttctcgccagcaataacgaaataattgccgaagaacatttcaccggcgaaataaaaaaagaagaagcaaaaaaaggcactattgcctggtctattctctcttctcataatacgtccggaaatatggataaacttaaaattaagtttgattcattagcctctcacgatattacctttgttggtattgtacagaccgctaaagcgtccggtatggaacgtttcccgctgccgtatgtgctgaccaactgccataactcactctgtgctgtgggcggcaccattaacggtgatgaccatgtttttggtttatcggcggcccagcgttatggcggtatttttgtgccaccgcatattgcggtcatccatcaatatatgcgtgaaatgatggcgggcggcggcaaaatgatcctcgggtcagacagccatacccgttacggtgcgttagggacaatggcggttggcgagggcggcggcgagttggtaaaacagctgcttaatgacacctgggatatcgactatccgggcgtggttgcggtgcatctgaccggaaaacctgcgccgtatgtggggccgcaggatgtggcgctggctatcatcggtgctgtgttcaaaaacggttacgtcaaaaacaaagtgatggagttcgtaggtcccggtgttgcagcgctctctaccgatttccgtaacagcgttgacgtgatgaccactgaaacgacctgtttaagttctgtctggcaaaccgatgaagaagtccataactggctggcgctgcacggtcgcggccaggattactgccaacttaaccctcaaccaatggcgtactacgatggctgcatcagcgttgatttaagcgccatcaaaccaatgattgcgctgccattccacccgagcaatgtgtatgaaatcgacacgctgaaccagaacctgaccgacattctgcgtgagattgaaattgagtccgaacgcgtggcgcacggtaaagccaaactctcgctgctggataaagtggaaaatggtcgcctgaaagtgcagcaggggattatcgcgggctgttctggcggtaactacgaaaacgtcatcgcggcggcgaatgcgctgcgcggtcaatcctgcggcaatgacaccttctcgttagcggtttacccgtcatcacagccggtgtttatggatctcgccaaaaaaggtgtggtagcagatttgatcggcgcaggcgcaatcatcagaaccgcgttctgcggcccatgctttggcgcgggcgatacgccaatcaacaacggtttgagtattcgccacaccacgcgtaacttcccgaaccgcgaaggctctaagccagctaatgggcagatgtcagcggtggcgttgatggacgctcgttctatcgctgcgactgcggcaaacggtggctatttaacctctgccagcgaactcgattgctgggacaacgtgccggagtacgccttcgatgtaacgccgtataaaaaccgtgtttatcagggctttgtgaaaggggcgacccagcaaccgctgatttacggaccgaacattaaagactggccagaattgggtgcgctgactgacaatatcgtcctcaaagtgtgctcgaagatcctcgacgaagtgaccaccaccgacgaactgattccttccggtgaaacctcttcatatcgttcaaatccgattggtctggcggagtttactctgtcacgccgcgatccaggttatgttggcagaagtaaagcgactgctgagctggaaaatcagcgtctggcgggaaatgtcagcgagctgacagaggtgtttgcgcgcattaagcagattgctggtcaggagcatattgatccgctgcaaactgaaattggcagtatggtctatgcggtgaaaccaggcgatggttctgcgcgtgaacaggcggcgagttgtcagcgtgtgattggcggtctggcgaatattgccgaggagtacgtgactaaacgctatcgttctaacgtcatcaactgggggatgttaccgctgcagatggcggaagcgccaacctttgaagtgggggattacatttacatccctggcattaaagcggcgctggataatcctggaacgacgtttaaaggttatgtgatccatgaagatgcaccggtaacggagattacgctctatatggaaagtctgactgctgaagagcgcgagattatcaaggcaggtagtttgattaacttcaataaaaaccgtcagatgtaaaaagcgccatgtgaatgtaggtcgcatccgcagttattgtcggatgcgatgccgacgcatcttatccgaccgacaaatcgtatcgaactgtaggccggataaggcgtttacgccgcatccggcacatagttaacagctcctacttcttcgcctctgcaaccactttgctacccacgccgcggttattgtattcccacatgcggttgtagttagtgtcattcagattgcgctgtacttcgtcgttatcatcaacgctgccggtgttacccgcaaatggacgattagagatcaccgcatcagcccacggtttggctgtgttaaaaccttcgttgatggcgctatcacggatcactacctgaccgttggtattggcatcaacatccagcgagcggcccagttgcgccacgccatcaccggaagcattgaaacggctgtttacggcgaggaaaccgtagtaaatgttggacagcgtagccggtgcaaacacatacgcttcttgctgggtacgggagttcaccacgcggaattcggtgttatcgaacaccactgcgccgcgaccagaaacgatatccacatccccttcaatatagctgttggtcaccagcgtacgtggctgacgattcgtttccagacggttctgcacaccgctgttggtgacaaagaaggtgttctgacgaccgagaatgttgacgttattgatctgcactttgtcgccatcagtacgcagtgccaccgccggatggttacccgcatctacgctatcgcccagcgtgttttcgatggtcaggttttgcagttgcaggccattgttttgtgaccagaagaccgcagagcagagaacaccgatactgtcgctgcgtttactctggcagctatcgtacatataccacgccggtttacctggcatatatttgccgcgcgggttgacgtcgtgacgccagtcggcagggctcatgccaccatcaagggaaagcccaatcttcacatcaatcggtttttcacccgtaccgtacagagtaattccacccggagcggcagggacatacaccgttccctgatactcaccaggcatcacggcaatatactggcgcttgttggtacgcttgataattgccgcatctaccgccgcctgaatcgtggtatgcgttacaccttgagtacccgccgggccgacaacaaagtcaggttgcgcaggcagggtaatcggggaaggattccacgctgccgcacctggtgtcagggatgcaaaatagtgttgagcatcgaaattctgcgcttcttttgccgacagaatcgggcgcgaagaggtaccaggcgcggtttgatcagaaggacgttgatcgggcggtgttgagctacaggcggtcagcgtcacgccaaaagccaatgccagcgccagacgggaaactgaaaatgtgttcacaggttgctccgggctatgaaatagaaaaatgaatccgttgaagcctgcttttttatactaacttgagcgaaacgggaaggtaaaaagacaaaaagttgtttttaatacctttaagtgataccagatggcattgcgccatctggcagagtgattaactaaacatcgcagtaatcgaggcactcgccagagagtgaaaatgaacgttaaacccgaccatcgcgccgctggcaccttcatcgacatcaatacgttctacatccagcgcgtgaacggtaaaaatgtagcgatgggtttcgcctttcggcggcgctgcgccatcgtacccggttttaccaaagtcggtacgcgtctgcaaaacgccgtctggcatagctaccagaccagagccaaacccttgcggtaatacgcgggtatcagcgggtaaattaacaactacccagtgccaccagccggagccggttggcgcatccgggtcatagcaggtgacaacaaaacttttcgttcccacaggaacatcatcccacgccagatgcggtgaaatattatcgccatcgtaacccatgccgttaaagacatgacgatgcggcagcttatcgccatcgcgcagatcgttactgatgagtttcattagaatgcctccgggaaacctcggccttcagaccggggaggaaaggaggcggttttccgactaactgtactttgcataatcacattttcctctttagtatgtgaacacatgaaacgcgcatataaataccggttttacccgacaactgagcaggctgagcttttagctcagacgtttggctgtgtgcgcttcgtctacaattccatccttcgttggcgtaccgatgcgtactacgagcgaaaagaaaagatcggttatctacaggccaacgctcgccttacggcgctcaaaaaagagcctgaatacatatggctgaatgatgtttcctgcgttcccctccagcagtcgttgcgccaccaacaagccgcctttgctaacttctttgccggacgagctgcatatccggctttcaaaagcaaacggcacaaacaggtggctgagttcactgccagcgcgtttaaacaccgtgacggcgagttgtatatagcaaagagcaagtcgccgctggatgttcgctggagtcgagaattaccatctgcgccgtcaaccgttaccatttccagagatagcgctggcaggtactttgtttcctgcctgtgtgagtttgaacctgtatcaatgcctgttaccgctaaaacggtcggcattgatgtgggcttaaaagatttattcgtcaccgataccggattcaaaaccgacaatccccgccacaccgctaaatatgcgaagcgattaacgctgctacagcgacgtttaagcaggaagcaaaaaggctcaagaaaccgtattaaagcccgcttaaaggtcgcccgactccacgcgaaaatcgccgattgccggatggacaatctgcacaagttgtcccgcaaactgattaacgaaaaccaagttgtttgcgtcgaatccctcaaggtgaaaaacatgatccgcaacccgaagctgtctaaagcaatagctgacgcaggctggagcgaacttgttcgccagctccagtacaaaggcaaatgggccgggcggtcagtggtcgccattgaccagtatttaccgtcctcaaaatgctgtagttgctgcggtttcaccatgcaaaaaatgcctcttaatgttcgtaaatggcactgccctgaatgcggcgcagaccatgatcgcgacattaacgcggcacgtaatattaaagctgccgggctggcagtgttagcccacggagagcctgtaaaccctgaatcgcagcacgcggcttaggttcggctcgttgaagtgggaatccccgtcattcagggcggggagccgtcaagagccctcctttcttgtttgcagaaagtgtagccagaaaccctcacgctgacttcccgttattggcaaaaaaatgtttcatcctgcaccgcacggttaaccgctgcggtcagacgctgcaactgttgcgggagaataatatagggcggcatcaggtaaatcagtttgccaaaaggccggatccagacaccctgttcgacaaagaatttttgcagcgctgccatattcaccggacgagtggtttcgaccacgccgattgcccccagtacgcgcacatcggcaaccatttcggcgtcacaggcgggggcaagttgctcgcgtagctgcgcttcaatagccgccacctgatgctgccagtcgccagattcaagaatcgccaggctggcgtttgctgctgcgcaggccagcggattgcccataaaagttggcccatgcataaagcagccggcttcgccgttactgatggtttccgcaacctcgcgcgtggtgagcgtggcggaaagggtcattgtgccgccggttaaggctttaccgagacacaaaatatccggcgcgatttctgcatgttcacaggcaaacagtttgccggtacgaccaaatccggtggcgatctcgtcggcaatcagcaagataccttcgcgatcgcacattttgcggattcgttttaaccattccggatggtacatgcgcatcccgcctgcgccctggacaatcggttcaatgatcaccgccgcgatttcatgacgatgcgctgccatcaggcgggcaaagcccaccatatcacgctcatcccattcgccatccatgcggctttgcggggcgggagcaaacaggttttctggcagatagcctttccacaggctgtgcattgagttgtccggatcgcacaccgacatcgcgccaaaggtatcgccatgataaccattgcggaaggttagaaaacgctggcgcgcttcgcctttggcctgccagtactgcaacgccattttcatcgccacttctaccgctacggagccggagtccgcgagaaaaacgcactccagcggttgcggcgtcattgccaccaatttgcggcacagctcaatggcgggcgcatgggtgataccgccaaacatcacatgcgacatagcatcaatttgcgacttcatcgccgcattaagctgcgggtgattgtaaccgtggatcgccgcccaccaggacgacataccgtcaaccaggcgtctgccgtcagacaaaattagctcgcaaccttcggcgcttgccaccggataaaccggcagcggggaggtcatggatgtgtatgggtgccagatatggcgttggtcaaaggtaagatcgtccgttgtcataatcgacttgtaaaccaaattgaaaagatttaggtttacgagtctacaccgaattaacaacaaaaaacacgttttggagaagccccatggctcaccgcccacgctggacattgtcgcaagtcacagaattatttgaaaaaccgttgctggatctgctgtttgaagcgcagcaggtgcatcgtcagcatttcgatcctcgtcaggtgcaggtcagcactttgctgtcgattaagaccggagcttgtccggaagattgcaaatattgcccgcaaagctcgcgctacaaaaccgggctggaagccgagcggttgatggaagttgaacaggtgctggagtcggcgcgcaaagcgaaagcggcgggatcgacgcgtttctgtatgggcgcggcgtggaagaatccccacgaacgcgatatgccgtacctggaacaaatggtgcagggggtaaaagcgatgggtctggaggcgtgtatgacgctgggcacgttgagtgaatctcaagcgcagcgcctggcgaatgccgggctggattactataaccacaacctcgacacctcgccggagttttacggcaatatcatcaccacccgcacctatcaggaacgtcttgatacgctggaaaaagtgcgagaagctgggattaaagtctgttcaggtggcattgtgggcttaggcgaaacggtgaaagatcgcgccggattattgctgcaactggcaaacttgccgacgccgccggaaagcgtgccaatcaacatgctggtgaaggtgaaaggcacgccgctggcggataacgacgatgtcgatgcctttgattttatccgtaccattgccgtagcgcggatcatgatgccgacctcttacgtacgcctttctgccggacgcgagcagatgaacgaacagactcaggcgatgtgctttatggctggcgcaaactcgattttctacggttgcaaactgctgactacgccgaatccggaagaagataaagacctgcaactgttccgcaaactggggctaaatccgcagcaaactgccgtgctggcgggcgataacgaacaacagcagcgtctggagcaggcgctgatgaccccggacactgacgaatattacaacgcggcagcactatgatctggcaggagaaaatcgacgcggcgcttgatgcgcggcgtgttgctgatgccttgcgtcgccgttatccggtggcacaaggagccggacgctggctggtggcagatgattgccagtatctgaacttttccagtaacgattatttaggtttaagccatcatccgcaaattatccgcgcctggcagcagggcgcggatcaatttggtgtcggtagcggcggttccggtcacgtcagcggttatagcgtggcgcaccaggtgctggaagaagaactggccgaatggctgggctattcgcgggcgctgctgtttatttctggttttgccgctaatcaggctgtcattgccgcgatgatggcgaaagaggaccgtattgttgccgatcggcttagccatgcctcattgctggaggctgcaagtttaagcccgtcgccgcttcgccgttttgctcataacgatgtcactcatctggcgcgactgcttgcttccccctgtccggggcagcaactggtagtgacagaaggtgtgttcagcatggacggcgatagtgcgccactggaggaaatccagcaggtaacgcaacagcacgatggctggttgatggtcgatgacgcccacggcacgggcgttatcggggagcaggggcgtggcagctgctggctgcaaaaggtaaaaccagaattgctggtggtgacgtttggcaaaggatttggcgtcagcggggcagcggtgctttgctccaatacggtggcggattatctgctgcaattcgctcgccatcttatctacagcaccagtatgccgcccgctcaggcgcaggcattacgtgcgtcgctggcggtcattcgcagtgatgagggggatgcacggcgcgaaaaactggcggcactcattactcgttttcgtgccggagtgcaggatttgccgtttacgcttgctgactcatggagcgccatccagccattgatcgtcggtgataacagccgtgcgttacaactggcagaaaaactgcgccagcaaggctgctgggtcacggcgattcgcccgccaaccgtacccgctggtactgcgcgactgcgcttaacgctaaccgcagcgcatgaaatgcaggatatcgaccgtctgctggaggtgctgcatggcaacggttaataaacaagccattgctgcggcatttggacgggcagccgcacactatgagcaacatgccgatctacagcgccagagtgctgacgccttactggcaatgctcccacagcgtaaatacacccacgtactggatgcgggttgtggaccaggctggatgagccgccgctggcgagagcgtcacgcgcaggtgactgcgttagatctctctccgccaatgcttgttcaggcacgccagaaggatgccgcagaccattatctggcgggagatatcgaatccctgccgttagcgactgcgacgttcgatcttgcatggagcaatctcgcggtgcagtggtgcggtaatttatccatggcactccgcgagctgtatcgggtggtgcgccccggaggcgtggtcgcgtttaccacgctggtgcagggatcgttacccgaactgcatcaggcgtggcaggcggtggacgagcgcccgcatgctaatcgctttttaccgccagataaaatcgaacagtcgctaaacgccgtgcattatcaacattatattcagcccatcacgctgtggtttgatgatgcgctcagtgccatgcgttcgctgaaaggcatcggtgccacgcatcttcatgaagggcgtgacccgcgaatattaacgcgttcgcagttgcagcgattgcaactagcctggccgcaacaacaggggcgatatcctctgacgtatcatctttttttgggagtgattgctcgtgagtaaatgttattttgtcaccggaacggataccgaagtggggaaaactgtcgccagctgcgcgcttttacaagccgcaaaggcagcaggctaccggacggcaggttataaaccggtggcctctggcagcgaaaagaccccgaaaggcttacgtaatagtgacgcgctggcgttacagcgcaacagtagcctgcagctggattacgcaacggtaaatccttacaccttcgcagaacccacctcgccgcatatcatcagcgcgcaagagggcaggccgatagaagcattggtaatgagcgccggattacgcgcgcttgaacaacaggctgactgggtgttagtggaaggtgctggcggctggtttacgccgctttctgacactttcacttttgcggattgggtaacacaggaacaactgccagtgatactggttgtgggcgtgaaactcggctgtattaatcacgcgatgttgactgcgcaggcaatactacacgccggactgactctggcggggtgggtggcgaacgatgtcacgcctccgggaaaacgtcacgctgaatatatgaccacgctcacccgcatgattcccgcgccgctgctgggcgaaattccctggcttgcagaaaatccagaaaatgcggcaaccggaaagtacatcaatcttgccttaatgtagtcatcctgtgcttggttaaattgtgagcgagatcgcgtctccgattgactgcaatttaaccaattaaattctaaaaaaatcacgaaaaaaattttacctccgcatcatgcggtgaatgtgggaattgcccaggcggcgggggataggggctgcagacagttatccactattcctgtggataaccatgtgtattagagttagaaaacacgaggcaagcgagagaatacgcggcttgcacgcaaattggcgttaaagacggctcaaagaaatatcttttattttttaacaggttagataattgcaatggcagtcactgaacaggcatctcttgccataaaactgtcatcaatcatcttgacaaatgttaaaaaagccgttgctttggggataacccggtaaggccggagttttatctcgccgcagagtaaatcttgttcatgattgacagcggagtttacgctgtaacagaaatattatggtgatgaactgtttttttatccagtataatttgttggcataattaagtacgacgagtaaaattacatacctgcccgcccaactccttcaggtagcgactcatgagtaaaccgttcaaactgaattccgcttttaaaccttctggcgatcagccggaggcgattcgacgtctcgaagaggggctggaagatggcctggcgcaccagacgttacttggcgtgactggctccgggaaaaccttcaccattgccaatgtcattgctgaccttcagcgcccaaccatggtacttgcgcccaacaaaacgctggcggcccagctgtatggcgaaatgaaagaattctttccggaaaacgcggtggaatatttcgtctcctactacgactactatcagccggaggcctatgtaccgagttccgacaccttcattgagaaagatgcctcggtaaacgaacatatcgaacagatgcgtttgtccgccaccaaagcgatgctggagcggcgtgatgtggttgtggtggcgtctgtttccgcgatttatggtctgggcgatcctgatttatatctcaagatgatgctccatctcacggtcggtatgattatcgatcagcgcgcgatcctgcgccgactggcggagctgcaatatgctcgtaatgatcaagcattccagcgtggtactttccgtgttcgtggcgaggtgattgatatcttcccggcagaatcggatgacattgcacttcgcgtggagctgtttgacgaggaggtggaacgattgtcgttatttgacccgctgaccgggcagattgtttccactattccacgttttaccatctacccgaaaacgcactacgtcacgccacgcgagcgcatcgtccaggcgatggaggagatcaaagaagagctggccgccagacgtaaagtgctattggaaaacaacaaactgatggaagagcagcggctgacccagcgtacccagtttgatctggagatgatgaacgagctaggctactgttcggggattgagaactactcgcgcttcctctccggtcgtggaccgggtgagccaccgccgacgctgtttgattacctgcctgctgatgggctgctggtggtcgatgaatctcacgtcaccattccacaaattggcggcatgtatcgcggtgaccgggcgcgtaaagagacactggtggagtacggcttccgcctgccatcagcgctggataaccgtccgctgaaatttgaagagttcgaagcattagcgccgcaaaccatctatgtttcggcgacgccgggtaattacgagctggaaaaatccggtggcgatgtggtggatcaggtggtgcgtccaacaggcttactcgacccgattatcgaagtgcggccagtggcaacacaggtggatgatcttctttcggagattcgtcagcgagcggcaattaacgaacgcgtactggttacaactctgaccaagcggatggcggaagatctcactgaatatctcgaagaacacggtgagcgcgtgcgttatcttcactcagatatcgacaccgtcgaacgtatggagattatccgcgacttgcgtctgggtgagttcgacgtattggtagggatcaacttactgcgcgaaggtctggatatgccggaagtttcgctggtggcgatcctcgacgctgacaaagaaggcttcctgcgttccgaacgttcgttgatccagaccattggtcgtgcggcacgtaacgttaacggtaaagcgattctctacggcgataagatcaccccatcaatggcgaaagcgattggcgaaaccgaacgtcgccgcgagaaacagcagaagtacaacgaagaacacggcattacgccgcaaggcttgaacaagaaagtggtcgatatcctggcgctggggcagaacattgccaaaaccaaagcgaagggcagaggaaaatcgcgcccgattgttgaaccggataatgtgccgatggatatgtcgcctaaagcgttacagcagaagatccatgaactggaagggttgatgatgcaacacgcgcagaatctggagttcgaagaagcggcgcaaattcgtgaccagttgcatcagttgcgtgagctgtttattgccgcgtcgtgacaagatgacgaagccggaatattcttccggcttcgtgttaacctaaagcctgtaatgccttttccagcgcgctatgcaacaactggcggtcatgacgatacggaatatcgctggcctccagcacttcctgaatcacaatccgctctttcaccgccgagacatccactttgggcccgacgatgaccgcatcaattacctttttaccaacatattgctccataattgccagcttgctttccagcttcagattagccgcaggtaaactcaattcacgccccagattgccgatatagaccatcggcgctggcgtgcggcgtaatgcctgtgcgatttccttcagcagcagaattggcatcaggctggtgtaaaaactgccaggcccaataatgatgagatccgcttcactgatagcgtgaaccgcctcacgcgttgcgggtacattcggcgttaacaataactcttgaatcggcgtagttaactggtcgatattgacctcgccgtaaacttcatgcccctgatcgtcaatcgccatcagatcaacaggatgctccgacatcggaatcaaatgtgcgtccactttcagcagatttcgaatcagattgatcgcttcaagaggtcgcacgctaaggtgatccagtgccttcagcatcaggtttccaaggttgtgtccggaaagttcgccattaccgccgaaacgatattcaaacattgcggaagcgacgctgggttcagttatcagctggttgaggcagttacgcatatcgccccaggcaataccgccttctgagcggcgaatacgccccgtcgagccaccgttatcggtggtggtgacgatacccgttaaacgagaacccaaagacgaaagtgatgagagaacgcgtcccagtccatgccctccgccgagagcaacgacacgatcaagatcagccagcgtacgattgcgcatatagtttcctggagtcagattatccgcgctacagtagcgcaaattgcgaggaaacagcaattaacctgccaatattgaggatacaaactattttcttctacctctaaaggacgatgcacgctatgcctccctgatgatgtatatcaaagtaaaaccgccattttcccttattctgtagcgaaatagcacgatcatgacgctatatacatgattacatagcgaaagtgtggatggtaaaaatctcatttacacgctagtatcggcttaaccactaaacactctagcctctgcacctgggtcaactgatacggtgctttggccgtgacaatgctcgtaaagattgccaccagggcgaaggaagaaatgacttcgcctcccgtatctggaaaggtgtacatggcttcacaactgactgatgcatttgcgcgtaagttttactacttgcgcctgtcgattactgatgtgtgtaactttcgttgcacctactgcctgccggatggttacaagccgagcggcgtcaccaataaaggctttctgaccgtcgatgaaattcgccgggttacgcgcgccttcgccagtctgggcaccgaaaaagtccgtctgacaggtggtgagccatctttacgccgcgactttaccgatatcatcgccgctgtgcgagaaaacgacgctattcgccagatagcggtcaccaccaatggttaccgtctggagcgcgatgtggcgaactggcgcgatgctggacttactggcatcaacgtcagcgtcgacagtctggacgctcgccagtttcatgccattaccgggcaggataaattcaaccaggtcatggcaggaatcgatgctgcatttgaggccggttttgagaaggtcaaagtcaataccgtgctgatgcgtgatgttaatcatcaccagctcgacacctttctgaactggatccagcatcgtcccatccagctgcgtttcatcgaactgatggaaacgggcgagggcagcgagctcttccgtaagcatcacatctctggtcaggttctgcgtgacgagctactgcgtcgcggctggatccaccaattacgtcaacgcagcgacggtcccgcgcaagtcttttgtcatccggattacgccggagagattggccttatcatgccgtatgaaaaagacttctgcgccacttgcaaccgcctgcgcgtttcctccattggtaaactccatctctgcctgtttggtgaaggcggcgttaacctgcgcgatctgctggaagacgatacccagcaacaggcgctggaagcgcgtatttcagcggcgctgcgggagaaaaaacagacccatttcctgcatcaaaataacaccggtattacgcaaaacttatcgtacattggtggctaaaacgtcaaaaggagagatcagatgagtcaggtaagcactgaatttatcccgacccgtattgctattcttacggtttctaatcgtcgcggtgaagaagacgatacctccggtcactatctgcgcgactcggcgcaagaagcgggccatcacgttgtcgataaagccattgtgaaagaaaaccgctacgctattcgcgctcaggtatctgcgtggatcgccagcgacgatgtacaagtggtgttgattacgggtggtactggcctgacggaaggagatcaggctcccgaagcgctgctgccgttgttcgaccgtgaaattgaaggttttggtgaagtgttccggatgttgtcgttcgaagagattggcacttccacgttgcaatctcgtgcggtagcgggcgtcgctaacaaaacgctgattttcgccatgccgggttcgaccaaagcgtgccgtaccgcatgggaaaatatcattgcgccgcagctggatgcccgtacgcgtccgtgtaatttccatccacatttgaagaaataagtatgtcgcaactgacccatatcaacgccgctggcgaagcgcacatggtggatgtctccgccaaagcggaaaccgtgcgtgaagcgcgcgccgaagcctttgtcaccatgcgcagcgagacgctggcgatgattattgatggtcgccaccacaaaggcgacgtatttgccactgcgcgtatcgccggtattcaggcggcaaaacgcacctgggatctgatcccgctgtgtcacccgctgatgctcagcaaagttgaagtcaatttacaggccgagccggagcacaatcgggtacgtatagaaaccttatgccgcctgaccgggaaaaccggtgtcgaaatggaagcgttaaccgcggcctccgtggcggcgctgaccatttatgacatgtgcaaagcggtgcaaaaagatatggtgattggtccggtacgtttgctggcgaagagcggcggcaagtcgggtgactttaaggtggaagcggatgattaacgttctttttttcgcccaggtgcgcgagttggtgggaacagatgcaaccgaagtggctgcggatttcccaaccgttgaagcgttacgccaacatctggctgcgcagagcgatcgctgggcgctggcgctggaagatggcaaattgctggctgctgtcaaccagacgctggtgagttttgaccattcgctgactgacggcgacgaagtggctttcttcccgccggtaaccggaggttaagatggcagaaaccaaaattgttgtcggcccgcagccgttcagcgtaggagaagagtacccgtggctggctgagcgtgacgaagacggtgcggtagtcacctttaccggtaaggtgcgcaaccataacctgggcgacagcgtcaaagcattaaccctcgaacactatccgggaatgacagaaaaagcactggcagaaatcgttgatgaagcgcgtaaccgctggccgctggggcgcgtcacggtaattcaccgcattggtgaattatggccgggcgatgaaattgtttttgtcggtgttaccagtgcgcatcgcagcagtgcgtttgaagccgggcagtttattatggattatctcaaaacccgcgcaccgttctggaagcgcgaagccacgccggaaggcgaccgttgggtcgaagctcgggagagcgatcagcaggcggcaaaacgctggtagtttattgttagccggataaggcaccgctgcgtccggcaatttcaccgctcagtacatgcgtttacgctgcgtcgatgcacagcctcatcattttgcagtatccttaagatattccttatatcttcaggagaaagtcatggacagattcccacgttctgattcaattgtacaaccccgggctggcttgcaaacttatatggcgcaagtctatggctggatgaccgttggcttgttgctgaccgcatttgttgcctggtatgcggctaactccgcggccgtgatggagctgttgttcactaaccgtgtctttttaatcggtctgatcatcgcgcaattagcattggttattgtgttatcagcgatgattcaaaagctgagcgcaggtgtgacgacgatgctctttatgctttattcggcgctgacgggtcttacgctttccagtattttcattgtctataccgctgcttctatcgccagtactttcgtcgttactgccgggatgtttggcgcaatgagcctgtacggttacaccacgaagcgcgatctaagcggctttggcaatatgctgtttatggcgttaatcggcattgtgttggcatcgctggtcaacttctggctgaaaagcgaagcattgatgtgggcagttacctacatcggcgtgattgtctttgtcggattgacggcgtatgacactcagaaattgaaaaatatgggtgagcagattgatacccgcgacacgtcgaacctgcgcaaatattccattcttggcgcgttaaccttgtatctggacttcatcaacctgttcctgatgttgctgcggatcttcggcaaccgccgttaattctttttcaccatcaatatcccggccatgtgtcgggattttttttcttactaaaaacgacacttaacaagtaccaggtataaaatatgccttatggacgagcggaagcgttttctgtatccataaatgcaaaagtattttgtatgcgtggttttaaatttattgatggtgaatattaatgttttttctaaggacaactaaaagaatggaatcatactcgcaaaatagcaataaattagattttcagcacgaagccaggatattaaacagcatatggctcattaccgctttgggtttggtggcaaccgcagggctggcctggggcgctaagtatctcgaaattacggcaacaaaatatgattcaccgcaaatgtatgttgctataggattattattactttctatgtatggcttgagtaaagatatcaacaagataaataccgccatcgcgggcgtaatatatttgtttttaatctctttggtggcgattgtcgttgcgagtttagcgcctgtatctgccattatcgtcgtgttcagcactgcgggatcgatgtttttaatcagtatgctggcaggtctattgtttaaatttgatcctggttctcaccgttttatcattatgatgacgttgacagggttggccctggtaatcatcgtgaatgccacattaatgagtgaacgacccatttgggtaataagttgcttaatgattgtcttatggtcaggcattatctcgcatggacgaaataagctccttgaactgacaggaaaaagccatagtgaagaattatggagttcggttcgttgtgcttttataggtgcattaacactctattactattttatcggcttctttgggattcttgccgctatagctataacgcttgtctggcaaaggcatacgcggttttttcattagccgtaaatgcacatactaaagaacttaactatacttcacatcgccgcttcatttttcgcccgtagcttcttcgcctggctttccagcaacaggtaacagatcagcgccagcagcagtgggataaagtaatacagcacacggtaagcgagcagggcggcgataattgtgcctttggaggtatgctccccagccagtagcgcgataaacaccgcttccagcacaccaattcccgccggaatatgcacgatgacgccagcaatactactaaccagcaacacgcccagtacaaagaaatagttcacgctttgaccaagtaacagccagataatcgctcccattaccatccagttaacgctggaaatcagcatctgggtgagggcgaatttccacgaaggcagcaccagcttttgccctttgatggtcatatggcggtgcttcgcgaaagcgcaaaaccacaaataaaccgcgataatcatcagtaagccaataccgagaatacgcagcgtagtttgatcgacataccagtgatccggcaactccaccacgcctgcggtaaagataacccccgctagcaaaatatagcctagccagttggtggtaatactgagcgaaaaaatccgcgtaatagtgctgcccggtaaccccagtcgggagtacaaacgatagcgcataccaatgccgccgacccaggtactgagtgtcaggttgaaggcgtagcagataaacgacaccagcatcacctggcgcttcgccagtttgtgaccgcagtagaaacgggcgagcaggtcgtagcaaccgtaaatcagataactgacgaccaccagcccgaccgcactaagcagcgcaacgcgattgtagtcgcggatgaccttccagacctcttcccagtccacttttttggcgtagaccaccagcaacacaatcaccgcgataaaaaacagccaggtgaggagtttctttgctaagcgccagcgcgggtgtgatttactcatcagggttttacccccgtgttttcagtttctacccgatcctgcgtttccattgtcggttgtgcggggggaccaacctgcgccagacgtggcgtgtgcgccggaagccagcccaccagcgccgggaagtggcgtaaaaagtggaacgccagcacgcttttggtcaggttccaccaggtgcgtttcggcagcatggtctcatcgacctgctgacaatctgcggcgataatgccgttcagattatcgcgcagcgtctggttaaaattacgatcgtggatgatgacatttgcttcgagattcagtgacaaactgagcggatcgagattactggaccctactgtcgcccagtgatcgtccatcaatgccactttgccgtggagcgggcggcggcggtactcaaacacctgaacgccgcctttaaccagatagttatacagcaaacgtgcgccgactctgacaatcggcatatccggttcgccctgaatgatcagtttgatccgcaccccgcgccgtgccgctttacgcaaggcgtgtaaaaaacgatagccggggaagaagtaggcgttggcgataatcacttcccgccgcgcctgagtgagcattttcagatagtgacgttcgatatcatcgcgatgttcttcgttatcgcgccagaccagcaatacctgcgcttctcccggctggcggttctcttccgctttatgatgacgtcgccaccagcgtcgcgccgcgctctgtcctggcaggttttccagctcaaactggagaatatcttcgacaatcggcccttcgaggcgaaccgcgtaatcctgtttggcctccgggccgtagctggacatatgctcggcggagtaattcagcccgccaataaaggcgatacgcgcgtcgatcaccacaattttgcgatgcatccggcgaaacacattggtgcgcataccaaaaaggcgagggcggggatcgtagtagcggaacaccacgccagctgccgtcagttcattgacaaactcatcgctgagatccggcgaaccgtagccatccagcaagacttccgcttttaccccgcgttgcgctgctgccaatagcgccgcatgcagctgtttgccgacgtcatcctcaaaccagataaacgtttcaagaatgatgcgttcttgcgcctcgccaatcgccttaaacaccgcgggataatattgctcgccgttttccagcaactggatcttattgccttcgcgccagctacatttcataaatgaatctccgcacttaaaggggcatgatcagaaaggtgtcgccatgtccgcagcggcaacgcggttggcgcgctggcgctggcatttttgacgtagatcctgtccagtcgtagtagaggaaattgcaccggaaacgtgcgcgccgggcgtccgtgggcgcgggtaaaaatctcatccagcccggcctgcacttttaacggatgattagctttttgccgccagtcgttgaaatcacccgctaccaataccggttcgccgtccggtagctcattcacccattcggcgagcatcgcaagctgcgcctgacggtgcgcctcacgcaggcccagatgtacgcacatcacatgaatcgctttcccggtcatcggcggcacaatgcggcagtagagcacgccgcgcttttccgcaccatcgaccgaaacatcacgattctcataatgttcaatgggataacgtgaaagaacggcgttaccgtgatgtccttccgggtatacggcattgcgaccgtaggcgaaatcgctccacatggtgtcggcgagaaactcgtagtgcgaggtatcgggccagttttccacatgcagcggatgaacttcgtgcgcgcccatcacttcctgcaggcaaacaatatcggcgctgacggtacgcacggcgtcgcgaagttccggcaaaatgaagcgtcggttaaacgcggtaaagcctttgtgaatattgatggtgagcaccttgaacgaaaattgttgtgtttgatcgggcataattttcctgtctttgcctcttatctcattgaaatagtgtagtcggcgtcacaaaaaggtgcggtcttacggaattttccgtaaagttcggtactctgaataagtagagataaattcttcaggagagaagccatgaagtggcaacaacgtgttcgtgtcgcaactggcctaagttgctggcagattatgttgcatttactggtagtggcgctgctggtggtgggctggatgagtaaaactctggttcacgtcggcgtaggattatgcgcactgtattgtgtcacggtagtgatgatgctggtgtttcagcgccaccccgagcaacgctggcgtgaggtggcagacgtgctggaagagctgaccacgacctggtattttggtgcagcgctgattgtgctgtggctgttgtcccgcgtactggaaaacaactttttgctggcaattgcagggctggcaatccttgccggcccggcggtggtgtctttgctggcgaaagataagaagttacatcaccttacgtctaaacatcgcgtacgccgctgaccctgtcgtggccgttatcaccagtagcggccacaaactattccacacaatatccagactcgcatccttcaaataaatctgcttggtaatgtccgtaaagtggcgaatagggttaatccacgtcagattttgcagccacattggcatgttttccaccggcgaaacgtaaccggaaaggagaatggcgggcatcataaagacaaacacgccgataaacgcctgctgttgtgttgaacagagtgatgaaatcaacagaccgaatcccaccagtgataaaccgtaaaccaccatcgtaaagtagaacagcgccagcgatccggcgaagggaatttgatacgcccagataccaatcgccagcacaatggtggcctggaaggtggcgacaattaatgccggtacggctttgccgatgaatatctgccaggtggtgagcggcgaaaccagtaactgatcgagcgtaccttgttcacgttcgcgggcgacggaaagtgaagtgacgatcattacgccgatagtggtgatcatggcgatcagcgacggcaccacaaaccatttgtagtcgagattcgggttataccagttgcgtaccaccagctcgctgttgttgggtttcggttttccttccagcagctcctgctgataatttttgacgatctgttgcaggtagttggcggcaatttgcgcactgttggagttacgcccgtctaggatcaactgtaacggcgcggtctggaaggtatccagtttgcgcgagaagtcagccgggaaacgcaccagtagtaacgccttttgtgtgtcgatggtcgggcggatctcctgcgggcttttcagcagcagcacatgggtaaaggcgctggcgcgggcaaaacgttgagtaagttccaccgaatgctcgccgttatcttcatcgtagatggcgatggtggcgttggtcacttccagcgtggcggcgaacgggaacaggatcacctgaatcagcacgggtaaaatcagaattgcgcgggtttgcggttcgcgcagcagcgactgcaactctttgcggattaacgtccataagcgatgaaacatgctcttctccctaatccagccgacgtttggttttcagccacgtcaggccgataaacatcaccgccgaagcgatcaaaaacagcacgttcaccaccagtaccaccggaatattcccggcgaggaacaggctttgcagggtgctgacgaaataacgtgcgggaataatgtacgtcaccgcgcggatcaccgcgggcatactgtctatctgaaatataaagccggaaagcataatcgacggcagaaaagccgcgttcagggcgacctgagcggcattgaactggttgcgggtaatcgtggaaatcagcagccccattcccagggtactgagtaaaaacaggctggagataaaaaacagaatcagcagcgacccgcgatacggcacgccgagaataaacaccgacaccagcatacacagcaacatcgccagcatcccgagaaagtaataagggatcagcttacacagcagcagttccgtgcgggtaatctctgtggagagtaacgcctccatggtgccgcgttcccattctcgcgccaccaccagcgaggtgaggatcgcgccgatgaccgtcatgataatggtcaccgcaccggggataataaagtgctggcttattgccgccgggttaaaccagtagcgggtttgtacatcaataagcggttcaaaagtctgcccgttgtcctccgctcgctgcatttgccagatctgccagatcccttcgacatacccctgcacaaagttagcggtattcggctcactgccgtcggtgatcacctgaatcggtgcggtggcgttggcgcgctccatctgttcggcgaaatccacgggaataaccaccagaccgcgaattttccccgcctgcattttggcgatcagttcctgacggttatcgctgatggtggcgtcgatgtagggcgaaccggtcatggtgtgggtgaaatccagcgccgcttcgctacgctgttccagtaaaatcccgacgcgcagcttgctggagtcgaggttaatgccgtatccaaaaataaacagcagtagcagtgggatcactaccgcaatcagccagctactcggatcgcgaacaatctgccgcgtctctttgacgcacagcgcccgcacgcgacgccaggacaggatcggattactcattgctatgctccttatcccagtcgtggatcaactgaataaaggcttgctccatcgtgggatcgggttgctcatcgttggccgactgcgctttcaaatcgtccggtgtgccgctggcgattaatttcccgcggtacaccaggccgatgcggtcgcaatattccgcttcatccataaagtgggtggtgaccatcaccgtgacgcctttctctaccatactgttgatatgtagccaaaattcacggcgggtgaggggatcaacgccggacgtcggttcgtcgagaaacagaatgtccggttcatgcatcagcgaacaggccagcgccagccgctgtttaaaacctaatggcagttcatcggtcgcgtgggaggcgatacttttcaggccgaacgcctcgctcatacgggagattttttcgttctgcgcccgaccgcgtaagccatacacaccagagaaaaagcgtaaattctgttcgaccgtcaggttgccgtagagcgaaaatttttgcgccatatagccgagatgctggcgcgctttaccggaactctctttcagatccatgcccagcaccagcgcctgaccagaggtcggtaccagcaaaccgcacatcatcttaaaggtggtcgatttacccgcgccgtttggtcccagtaaaccaaaaatctccccgcgtttaacggcaaagttgacgtgatcggtggcggcaaaatcaccaaatttcttggttagttccttcgcttcgatcaccgtctcgccaggtgtacctcctaccgtatgtaatattgcgcccagcggcgattccgaggttccggcaccgcccagcaaatcaataaatgcatcttcaaaacgcggcgtagtttcgttaatgttgatttccggcatcccgtcggcatggcgaatatcgtctggtgtagcctcttttttgaggatcagacgtaccgatttcccctgaatcatgccgtcgctgacctgcggcagtttcaatgcccgttgcaacagtttgcggttgccctcgtgcgggctggtcatcagaaagctgcgtccggccatggtttgagtcagggccgtcggttctccctgatacagcagctcgccttcgttcatcagtaacacgtcacggcactgctcggcttcgtcgagatacgaggtactccagaggattaacatcccttcgcccgccagctcatgcaccatctgccacagttcgcgccgtgagatagggtcaacgccgacgccgggttcatcgagcagcaacactttcggttcgcctaccagggtacaggccaggccgagtttttgtttcatcccaccggagagcttgcccgccaggcgtccggtaaacgggccaagagatgtaaactccagcaggcgagcaaaagtctgcttccgtgcctcgccggtgacgctgcgcaaatccgcgtacagattgaggttctccatcaccgtcagatcttcatacaggccgaatttctgcggcatatagccgagcacggcgtgcagcgcgccgtcgtttttgatcggatcaaagccaatcaccgtggcactgccgctgtcgggtttcagtaatcccgccagcatccgcatcagcgtggttttgcccgcaccgtccggcccaaccagccccgtcacataaccggcgtgaatggtgcagtcgagcggtgcgacggcgggcttgtccatgcccggaaagcgtttttccaggccgttcagcgtgataacggcatcattcatgtcctgcctcgtcaccgaattgcaccgttaccggcattccctggcgtaacgcatcatcggcgtcggtcaccacaatacgcaggcgatagacgaggtcggtacgcagatccggtgtttcgacggttttcggggtaaattcagcagtcggcgaaacgaaaccaatctgcccgtgatacggtttgttcggacgaccatcggtataaagcagcactttgcgccccggctgggcctggtcaagattacgttcatcaacataggcgcgtacccacaccggacgcgtcagcgagacggtaaataccgtgccaccttcattaagcaccgtgcctggctctaccgcgcgcgttaacagcgtgccatcagacggagcgaccagcgtcgaatcctgcaaattcagctccgcctgcgccagttgcgcctgcgcttgttcgaggctggctttcgcctgggcgatgtcctgttcgcggttaccggaacggtactgacgcaatttatcctgcgctgatttcagcgtggcctgcgcctggtcgcgcgaggagcgggcattttccagatcatttgccgaaatggtgcggcttttccacagtccttgctggcggttatagaagttctgcgcatagtcataggcagcttgcgcctgtttcaccgctgcggcggcctgagcgatttcttcgtcgcgatacccggcaagcatcaggtcatactgcgcctgagccaccgaaacgcccgctttcgcctgcatcagggcaatctcatacggcttgtgatccagttcgcccagcacctggcccgctttgatcgcatcaccttcgtccaccgccagcgactcaacgcgccccccaacacggaaactaagattcaccgtacgaatatccacgttgccatacagcgtcaggccgttatcctggcggctttgataccaccagtagcctccggcaaccacggcggcaagtactactaccgccagtccgatcacgacaggttttttcatcactacaaactcctttgcgataatccttgcaaaatcaggtcaatatgacaggtcaccgtctggttaatcagttcggtcttttcttcatcgaacgcggtccagccggtacgtaacaaaatggtttctttgccaagacgaaatgccagaatctcaccaatcaacgcatgggtatgaaggatcatgcgggtgtcattggcgtcgcagccggtcctggcggcaatcaggcgtgtaaggtggctgtgtagcggactaattacctgttcgtgcaccaggtgataggctgccgtgggagagagctgctcacgggagataaatttgctgaggttgacggtgtcatcctgggtgagcagcttaatcatgttcttgcaggcgcgaaggatcagttcgcggatggcagcccgatccggctgtggttgtgcgaacaagcgttcggcttcttcagcgtgcggacggaactgctcgccaataaaatcggcaatccactgggcgcaggcgagatacaaatcttctttcgaaccgaagtagtaggtgatggcagcgatattctgcccggcctgggcggctatctcgcgggtggtggcgttcattccatattcaccaaactgtgccagtgccgcagcaatcagctgttttttcgcctgttcacccttgattgtcatggcaggattattcatcgcacagtccattcttaatcaaatgattgattaagattatgactccataggggagttgtccagtatggctaagaattttagctacgccagtcacagggataatttatgcgctgcgtcacaaaaactgctacactccgctccctcatgacattgtggtttttgtcattttccttttcagtatctccctgaaaactacaccggtaacggtcggggcggttcggagtagttatgtctttcgattctttgggtttaagccctgatatcctgcgcgccgttgccgagcagggttaccgtgaacccacccctattcagcagcaggcgatccctgcggtgctggaaggccgcgacctgatggccagcgcccagaccggtaccggcaaaacagcgggctttacgctgccgttgttgcaacacctgatcactcgccagccgcacgccaaagggcgtcgtccggtacgcgcgctcattcttaccccgacccgtgaactggcggcgcagattggcgaaaacgtccgtgattacagcaaatatctgaacattcgttcgctggtggtgtttggcggtgtcagcattaacccacaaatgatgaagttgcgcggcggcgttgatgtgctggtggcaacgccgggacgtctgctggacctggaacatcaaaatgcagtgaagctggatcaggttgaaatcctcgtccttgatgaagctgaccgcatgctcgacatgggctttatccacgatatccgtcgcgtgttaacaaaactgccagcgaagcgccagaacctgttgttctccgcgaccttctctgacgatattaaagccctggcggaaaaactgttgcacaacccgctggaaatcgaagtggcacgccgcaatactgcgtctgatcaggtgacccagcacgttcactttgtcgataagaaacgcaaacgcgaattgctgtcgcatatgattgggaaagggaactggcagcaggtgctggtgtttacccgtaccaaacatggcgctaaccatctggctgaacagcttaataaagatggcatccgtagtgcggcgatccacggtaataaatcgcaaggtgcgcgtactcgtgcgctggccgattttaaatcgggcgatattcgtgtactggtggcaactgacatcgctgcgcgcggcctggatatcgaagagttgccgcacgtcgtcaactatgagttaccaaacgtaccggaagattatgttcaccgtatcgggcgtactggccgtgcggcggcaactggcgaagcattgtcgctggtgtgtgttgatgaacacaaactgctgcgtgatatcgaaaaactgctgaaaaaagagatcccgcgcattgcgattccggggtatgagccggacccgtcaatcaaagccgaaccgatccagaacggtcgccagcaacgtggcggcggtcgtggacagggcggtggtcgcggtcaacagcaaccacgccgtgcggaaagtggtgcgaagtctggtaacgcgaagcccgcagaaaaaccgtctcgtcgtctcggcgatgccaaaccggcaggcgaacaacaacgtcgccgccgtccgcgtaaacctgccgctgcgcagtaatcttttatgccgggctatgcccggcatgagactgatgacaaacacaaaactgcctgatgcgctacgcttatcaggcctacgtgaactctgcaatatattgaatgtgcatgtttttgtaggccggataaggcgctcgcgccgcatccggcatttcacaacaagcacttgtcagccatttgcgagcgcggcaaaaagatttctctgttttaacgcccacaagccacccgatgcgttacttctccgcagccaattgtccgcgcaacgccattaaaaggtaccccaggcgattcttgccctgaccattaccgccatctccccagtaagcatcattttgcgtatgctcaaccagttttgcggacgcggttgccagcaagagtgtacgcagttctgcatgttgttcgaatttagcgcgaagcgctttacgcatcatcctgctggttattgcgagccgctttccagaaacagaaaaaccattacccctgaaaaccgaaaaatgccacaatattggctgtttatacagtatttcaggttttctcatggcattaaccgccgcgcttaaagcgcaaattgccgcctggtataaggcgcttcaggaacagatccccgactttattccccgtgcgccgcagcggcagatgattgcggacgtcgccaaaacgctggccggagaagaagggcggcatctggcgattgaagcccctaccggcgttgggaaaacgctctcctatttgatccccggcatcgccattgcccgcgaagagcaaaaaacgctggtggtaagtaccgccaacgtggcattgcaggatcagatctacagcaaagatttaccgctgctgaaaaagatcattcccgatcttaaattcactgccgcttttgggcgtgggcgctacgtttgcccgcgtaatctgacagcgctcgccagcactgagcccacgcaacaggatctgctggcgtttcttgacgacgaactgacgccgaacaatcaggaagagcaaaaacgttgtgcgaagctgaagggcgatctcgacacttataaatgggatggcctgcgcgatcatactgatatcgctatagatgatgatctctggcgtcgtttgagtaccgacaaagccagctgcctcaaccgcaactgttactactatcgcgaatgcccgttttttgtcgctcgtcgggaaattcaggaagcggaagtggtggtggcaaaccatgcgctggtgatggcggcgatggaaagcgaagcggtattgcctgacccgaaaaatttactgctggtgctggacgaaggtcatcacctgccggatgtggcgcgggatgcgctggagatgagcgccgaaatcactgcgccctggtaccggctccaactggacctgttcaccaaactggtcgccacctgcatggagcagtttcgcccgaagaccatcccaccgctggcgatccctgaacgtttgaatgcgcattgtgaagagctgtatgagcttatcgcctcgttaaacaacattctcaatctctacatgcctgccgggcaggaggcagagcaccgttttgcgatgggcgaactgcctgatgaagtgctggagatctgccagcggctggcaaaactcaccgagatgctgcgtggtctggcggagttatttcttaacgatttaagtgagaaaaccggcagccatgacattgtacgcctgcatcggttgattttgcagatgaaccgcgcgttggggatgttcgaggcgcaaagcaaactctggcggctggcgtctctggcgcaatcttccggtgcgccggtgaccaaatgggcgacgcgggaagagcgcgaagggcagctacatctgtggtttcactgtgtgggtattcgtgttagcgaccaactggaaaggctgctgtggcgcagtattccgcacattattgttacctccgcaaccttgcgttcgctgaacagtttttcgcgtttgcaggagatgagtgggctgaaagagaaagcgggcgaccgttttgtggcactggattccccctttaaccactgtgaacagggcaaaattgttattccccggatgcgcgttgagccttccatcgacaacgaagagcagcacattgctgaaatggcggcctttttccgtgagcaggtggagagcaaaaaacatctcggtatgttggtgctgtttgccagcgggcgtgcgatgcagcgctttctcgactatgtgacggatttacgcctgatgttgctggtgcagggcgatcagccacgttatcgcttagttgaactgcaccgcaaacgcgttgccaacggtgagcgtagcgtgctggtgggcttacagtcctttgccgaaggtcttgatctgaaaggcgatctgctcagccaggtgcatatccacaagatcgcttttccgcccatcgacagcccggtggtgatcaccgaaggtgaatggctgaaaagcctcaaccgctatccgtttgaggtgcaaagcctgccgagcgcttcgtttaacctgattcagcaggttgggcgactgattcgaagccacggttgctggggggaagtggttatctacgacaaacgcttgctgacaaaaaattatggcaagcgactactggatgcattaccggtatttccgatagagcaaccggaagtccctgaaggtatagttaaaaagaaagaaaaaacgaaatccccacgccgtcggcggcgttaatgatgtgagtcaggtaaggagtcgtaaatggactatcgcaaaatcattaaagagatcgggcgcgggaaaaaccacgcgcgcgatttagaccgggatactgcgcgcggtctgtatgcccatatgctcaatagtgaagtccctgaccttgagttgggcggcgtattgattgcgctacgtatcaaaggggaaggggaagcagagatgctcggcttttacgaagccatgcaaaatcacaccatcaagctgacgccgcctgcaggcaagccgatgccgattgtcatccccagttacaacggcgcgcgtaaacaggccaacctgacgccgttgttggcgattctcctgcacaaactcggttttcccgtggtggttcacggggttagcgaagatccaacccgcgtgctgacagaaaccattttcgaactgatgggtattacgccaacgttgcacggcgggcaggcgcaggcgaagctcgacgaacatcaaccggtgtttatgcctgtcggcgcgttttgcccgccgctggaaaaacaactggcgatgcgctggcggatgggcgtgcgtaacagtgcacataccctggcgaaactggcgacgccatttgccgaaggtgaggcactgcgtctttccagcgtttcgcatccggaatacattggacgcgtcgcgaagttctttagtgatatcggcgggcgggcgctactaatgcatggtactgaaggtgaagtgtatgctaatccgcagcgctgcccgcagatcaatctcattgaccgtgaagggatgcgggtactgtatgaaaaacaggacactgctggtagcgagttactgccacaagcaaaagatccggaaaccacggcgcagtggattgagcgttgccttgctggcagcgaaccgattcccgaatcgctgaaaatccagatggcttgctgcctgatggctacgggtgaagcggcaactatcagcgacggcctggcgcgcgttaatcaggcattttaatttttatctcagccggatgagccatgtcatccggcttttaccccaccgcaatatgaaattcctgcatctttattgaccttcccgcgcccggcgtgcagcataaaaaaacaacaaacacataacataaacaggagttaaccatggtaagtggtcatcgctttgatgctcagacgctgcacagttttattcaggctgtatttcgtcagatgggtagtgaggaacaagaagcgaaattagtcgccgatcatttaatcgcggcaaacctggcagggcatgattcacatggtattggcatgatcccaagctatgtgcgctcctggagtcaggggcatctgcaaattaaccatcatgccaaagtcgttaaagaagcgggggcggcggtcacgctcgatggcgatcgcgcatttggtcaggtcgcggcacacgaagcgatggcgctggggattgagaaagcgcgtcagcacggcattgccgccgtggcgctacataactcgcatcatatcggtcgtatcggttactgggcagaacagtgcgcggcggcggggtttgtctctatccactttgttagcgtggtcggtattccaatggtcgcgccgttccacggtcgcgacagccgctttggcaccaatccgttctgtgtggttttccctcgtaaagataatttcccgctgttgctcgattacgccaccagcgccattgcatttggcaaaacccgcgtcgcctggcataaaggcgtccccgtgccgccaggttgcctgattgacgttaacggcgtgccgacgacaaatccggcggtaatgcaggagtcgccgttgggttcgctgttgacctttgccgaacataaaggctacgcccttgcagcgatgtgtgaaattcttggcggggcgctttctggcggtaaaacgacgcatcaggaaacgttacaaaccagtcctgatgccattcttaactgcatgactactatcattatcaacccggaactgttcggcgcgccggattgtagtgcacagaccgaagcctttgccgagtgggtgaaagcctcgccgcatgatgaagataaaccgattttgctaccgggcgagtgggaagtgaacacgcgtcgcgaacggcaggagcaggggattccactggatgcgggaagctggcaggccatttgtgatgcagcgcggcagattggtatgccggaagagacgttgcaggctttctgtcagcagttagccagctaaaaaaagcccgtccagtggcggacgggcaaacaagggtaacataggatcaatgagggttagagcatatgcgtctgtcggcaaacagacagggaaatacttgtgctgaacgtagcgtaaacgcctgatccagccaacggttcggattttgtaggtctgataagacgcggtagcgtcgcatcaggcatctgttgccggatgcggcgtaaacgccttatccgtcctacgaattacttataaattaccgcagtaccgcttaatttattgttgttggtggcagaagtgatgctgtatccactggcaccggccgccgcggctttctcagccagtttcgcttccagggcatcgagggtggatgcgccatcggcagaaaccacgccgattttattcatgttctgtgcctgggatgccgttaccggttccgccgcgaacacaccaaatgacagagttgaaagagccatagcagcaacaacagtattgatagttttcataattaatctctcgcaggtgatttttgtataagtgacgttgtttcgtcgatgtgatgagtatcacgtttttttacgagagataaaatcgaagagaattgaccgccttgttcaaataaattgattgatatctaacatactgataaaccatttatttgttgtatttatgaatccgttttgtaccgcgtggtgctcacggcagcgttaaaggcacggaatgccacgcaaaatacaaattacactcactaaacatcccgtcagttgcagttaacgtaactggctgtctttcgaacctctgcgattatatcctgtataagctggtttttgtaaatctttctcctgttggcaatgaatgcataagcgcacgccaggaatggcttcccgacgggcctgcgggataggggcaccgcactcttcacattcatacaggctttcgccacgcggaatttcaccccgagcgcgggcaatcgcatcttcaattgtactgttgatctgttcgttgacggcgtcatcattagcccaaccggatgccatatcgtcctccccatatcaatgcttgtacagttaagtgtagctaatatagggacgaactcgggcagttcaagcgtcagatctccgaccattcccgcagcagattatgataaagattgagcagcgacaggatctcttcactttcgccgtagtggcttttcagcgactgaatattgttgtccagttcaaacagcatggcgcgctttttatcatcgcggatcatcgactggatccacataaatgatgccactcgcacgccgcgggttacgggtgtcacgcaatgcaggctgctggagggatacaacaccagatcgcctgccgggagttttacccgatgttgcccgaaggtgtcattaacgaccagttcgccgccgtcgtagctttctggatcgcttaaaaacagcgtggcagaaaggtcagtgcgcatccagccgttttgtggatggctgcgtactgcgccatccacatgaaaaccataggtttcattgttctgatagcgattaaacagcggcgtggaaagggtacgcggcaaggccgcggcaaagaacaaagcatgttggttaaccgcgttcagcacctcattttgcagggcggcgtacagggcgctgcgggtgtctacttgttgattgttcttaacttgcgcaccttgtgcgccggtggtgacgcgcccatccacccattcggcttgttccaggtgttcgcgaaaacgggcgacgtcctgtggcgataacacgccgggaatgtggtacatcatacaagttctccaaaaagtggggcctgcgccccacaccgatttttaacagcaggcaatggtgctcaggtgccggatgcggcgtgaacgccttatccggcctaccaaatgatgtgaattcagtgtattgcacaaccttgtaggcctgataagcgcagcgcatcaggcagtcctgctctcgccatcaacattagtgagccttgcgccccacatctgaatcagaaatgcatattagctgtgagcaagaaggttcttggctcgcccgggtgataacggtagccgctcttattgattgaggcgacgtaatcggtatcaaacaggttgtagacgtttagctggaagtcgagattgcgattaacccgataccccagtttggcgtcggcgacccaataaccttcggtaaatgctggcgtccccaccgcgccgtctgaacctttatgcatactgccgatataccgtgcgcccgcaccaacagaaatatcatcggttgcctgatactggctccataaggtgaaggcgtgttccggggtatacggcagcgatgaggaaccatcctgggcaacatctttgccgtttttgatagttgctttttgctgggtatagccgccaatcatctgccatgcgggggtgatattcccggccacggatatctcgtagccttcgacacgtttcttaccatattgcgaataagtcccgtcatcattttgctcaacttcattttcaatatcagtacggaacagcgcggcggtaagtagcaggcgtttatccagaacctgccatttggtgccaatctcgctggtgttggctttttgtggtttaaaatcggtgcggttggcactgttaccgctgccagactgcgcaagggcgaagttgttgccgcccggcggctgctgggaaacggcatagttaatatagacattgccgttttccgtcaggtgatacagcgccccggctttccagttcaccagattgcccgacttggcggtgtcgacggtggtgaccggagaaccttttgccacgccagcagggcaggtgatggcaccgcgcccgctgccgccgcaggcggtagcactgtcatattcagtatgataattatccagacggatcccgccgttcagctcaaaatcacgggtgatttgcagcgtatcgaaggcataaattgcgaaggtatccgtctgaccattggcgtttgcgccgttgcgcgtcaggccgccgggatgaatgctgctgtcaggatgataaatatttaccgccggtaacgtcaccggattaacgccatagttagtctgtgtttcgcgggtaaattccacgccggtactgagatcatgaccgatagcgccggtatagaacgtcgaggtcaggttggtctggttggtgagaattttgttactcacatctttggtattcgccgtgcgtgaccacgtccagctattcacatcgctggtgggctgggtaatattcgacgctccacccataatcgccgtcatcaggtaatcctgctttacgcgcgaccaacgcgtagtgttgcgaatggtggtgttatcgttgatgtcgtgctcaaaacgcatggtagcggtgtcggtggtcgaatcgtcgtaatcggaatctgtgccgtaaaagttatgagtatcaacttttccggaatgattcagggctgctgttcccgcagatggggcagaataacccggtaaaccgatggtcggaatgccgccgtctggcgtgttgtgctgggtgacatgcagataattaagatacaaacgattcgctgtaccaaggccaaaaacgacagaaggggcgacgccgtaacgctcatttttgactttgtcgcgtccggcatcgtgcgttttttcgcccattacattcaggcgcaccgcagtggtatcaccaatgacctgattgacgtccagcgtgccgcggcggaaccaggcgctgccaatactggcggaggcgtcaatgccggaatcattgcgcggctgtttgctgatcatattgatcgagcctgtcggtgcgctgcgcccgtagtcggtgccggacggccctttaattacttcgacctgctcggtattgaaggtgtcgcgcgagacgctgccgatatcgcgaatgccatcgatataaatactgttagaggtatcggcaccgcgcatataaatggcgtcgccagtggtggagttaccgttctcacccgcaaaaaacgcacccacgccggggacgtttttgagcgcgtcggtaaggttggttgcaccctgatctttaatcacttgttcagaaatcaccgtcatcgtgcgggtagtatccgctaccggacgcgagaatttcggatcggcagattgttgtggcgcataaagcgaaggcgttgatgcttcgacaaccagcgtgtcatccgcgttagcttgcccttcggcagcgagtgcctgtgccacaggcgtaataccaatacaaagaccggcaaagaacgtgagcgaatgaaattgtctggcagggaaattgcgattgttttccattttgcaggtgactttttcttatatggtgaaattttcactgtcacgagaaagcatctctgcggatgcgatgccactgttaatcccgtgatagcgtacgtgcaagtgataataattttgataagcattatcacttggcgcgattttctatcacccattgcgcgaaaaagaaatacatttatttacattgcgttcatatttgatgttttttgcttacaaatcggacgaaaactgcatccagagacgaatgcagttacgttggtggggttatttgtagatgattgcagtaccgaacatctggtcatttccgcctgcggaattaatgacataacctttcgcgccttgttcgcgcgctttttctgccagtttatcctccagatcgcttaggtttgatgcgccagttgccgaaacggtaccggcgggccgtagttgacctctgtccaggttactcatcggttgcgcggcataagccgtgagagagattccgctcaggacggtggcaatcagtagtgtgaggcactttttcataatgacatcctcataaatacaacgggtagtgccagataagtgtaggtcgcctgcgcgatgaaaatgacgtaaaaaattgacagagatgtgcttattttttgaacgatatatttttacaaaataagacaaatcaatgacatgcatgatgatgatttttatggtgaattgccataaaccatagccatgtgaaggtttttagaaatgataaacgcagccagatatttaccctgtcgcgttatgcgggtatcttacgccgctgcttaaaggagaatgctatgtccgcccagaaaccggggttgcatccgcgcaaccgtcatcacagccgctacgatctcgccacgctttgtcaggtcaatcctgaactcaggcaattcctcacgcttacacccgccggggagcaaagcgtagactttgccaatccgctggcggtgaaggcgctcaataaggcgttgctggcccatttttacgccgtagcgaactgggatatcccggacggttttctctgcccaccagtaccgggccgggcggattatattcatcaccttgccgatttactggccgaagcaagcggaacaattccagctaatgccagcattctggatatcggcgttggtgcgaactgtatttatccgctgattggcgtacatgaatatggctggcgttttaccggtagtgaaaccagcagccaggcgttaagcagtgcgcaggcaatcatcagtgctaatccggggcttaaccgcgccattcgtctgcgtcggcaaaaagagagtggggcgatttttaacggcatcatccataaaaacgagcaatacgatgcgaccttgtgtaacccgccattccacaattccgccactgcggcacgggcaggtagtgaacgtaaacgccgtaacctggggctgaacaaagacgatgcactgaactttggtggtcagcaacaggagttgtggtgtgaaggcggtgaagtcgcctttattaaaaagatgattgaagagagcaaaggcttcgcgaagcaggtgatgtggtttacctcgctggtatctcgtggtgaaaacttaccgccgttgtatcgtgctttgacggacgtaggtgcggtgaaggtggtaaaaaaagagatggcccaggggcaaaagcagagccgctttatagcctggacctttatgaacgacgagcagcgccgccgttttgtcaatcgccagcgttaaagcgttggctcccccggcggcaacggttcagccggggccgcgcccggagctggcagcacctgataagtctgtaccggcgcgcgaacacccgccaggtcgaaatgttttttcacctggctgtcgagggcaaagcggaccgtccactgtttgagtggcagcgtggtgaacgaaacacgcagtgtaaacgcggtattgcttaagccgacaatcccggcaaagttcggttcaccaataaccagcccgcgaatttcttcgttttccatcaattctgctaccgcatctttcagtgcctgattggctttatcagcatcttcatggcgatcaacatcgtagtttgccactaccgaaccaataccgcggacgaagttagcaaaggtggttatcgaagaccacggaatgatgtgatacgccccggtatcctggcgcacgcccacggagcgaatcgacatccgttccacagtgccggtcaacggcccgatagtcaccaaatctccagtgttcatgccgttttcaaactgaataaatactccggtaataatatctttcaccagcgtttgcgaaccaaacgagatagccagacctaatgccccggcacctgccagcaatggcgcgatattgacgccgatttccgacaacacaatcatgatggtgatggtactgataatcaccgccagcgcgttacggaacagcgtcagcagggttcgcgtacgggcgctgggtagcgggcggccatgaatatccgaagccagccggttttctatcaaactggcgagcaccgtccagccaaccgccgagaagaaaagaatgagtgcgatacggatcaggatatctacggttttctgccccgctccgttttgcagccagttccagaaatcgaacaatccccatgcgctcaacagcagcattaccgccacgcagactgtcagaatacgcgctgttttcagtgccgccgaaagccatccattcagccgtttttgcagctcgggatagttacgctgagtatgtggcgagagggtgatggttttcgccaaccagcgggaaaacataccggaaacaaatgctgcgataccaataatcgccaggctgcgcaccgttgcacccatcataaatttcaggctgttgcccggatcgaacaacgaaaagaaaaacagcacgataaaataggcgcttgccagccagtgccacaccagcgcaaaggcgcggataaacaggctgaaaaaggccagcgaatgctccgcaaagttgagcaaatgctgggtgatctcttttttattacgaaaaatcaggtacaacgcccagacggtcatgcacagcataatgatgacgttcgccagtgcacctatctgtacattcacctgattagagataatcggcacagccacaatcagaccatagccaatcaggctgcttaaccagctcaggcgacgactccagtaacgggcggtctcgtcatgaatcgtgaacgggcgcagttcagccacgtttgggcaaaaaatcaggcgtagtacggctttgaaaaattcaatcagggcaaaggcgttgagaaacaaactttgttggaaagcgatggtgcgactgcccgcattcaggttgtcgcttaaaacctgaccgacaaataatgtcagtgccagtaacagcaggtcgataataaacgccccgataatcatcgccggaagctgcaaccagttactgcgctcacgatttttttgccgcgcccactggcccattttgcgatacagcggaagtgcgcacaggcgaatcagccagtaaaaaccaaacactaataccgctaacattgaaaaatgggtcaacgcattgctgaaggtttgtggattaaacggcttatgcggggagccggtgatattgcgataaagttgtccgaagcgggcggaaagggcttcaccataatggcggctgacttcggtgactttttgcagcacggtttgctcttcaaccagcgtcggcggcacgatcttcggtacgggttccgcagggggcgtcgcggcgacggtgcgcaactggtcgatcaactctttacgcgaggtgtcattatccagcacatccgccagtgcgccataggccgcttttttttgttcgatatccgattccggggccggttcagtcgttgagtccgttgtcgttgtggttgtaacgccgggtatggataccgcgtgggcaggtgcgcccaacaggcagaagaggatgaacaggatccaccgcatgactcctccagtgagaaaacagagcaaaaagataagtatagatgctggaggctgggcgattttaaatgagaggaatctggtgtgcctccctttcgggggaaagggaggcagagaagttaagagacgtgctgcaaaaattcctgcaagcgctggctcggcgggttcttgatcaacacctgcggatcgccatcttctgcaatccggcctttgtcgataaagatcaggcgcgaagctactttctcggcaaaaccgatttcgtgggtcacgatcaccatcgtcatcccttcttcagccagatcctgcataaccttcagcacttcatggcgcagttccgggtcaagagcggaagtcggttcatcaaacagcatcattttcggcttcaccgccagcgcgcgggcaatcgccacacgctgctgttgaccaccagaaagttcggaagggtagtgatgtgcacgctctgccagaccgactttcgccagcagctcacgcgccagtttttccgcctcttctttgttcgcgccacgcacgcgtagcgggccaaacatgacgttttccagcgccgtcagatgcgggaagaggtaaaactgctggaacaccatacccgcttcctggcgaatcaggcgctcatcaactttcggatcgttaaccttcaggccatcgacaatcagatcgccggaggtgatttcttccagtttgttgatgcagcgcagcagggtcgatttaccggaaccggacggcccgataatcaccacgacttcgccctgagcaatgttcaaatcgatattgtgcagcacctgggttggaccaaaatgcttggagacgtttttaaattcaatcacaggattttcatccttctttccagacgacgcagaataaagctcagcaccagggtaataatcagatagaacaccgccacggcgctccagatctcaagggcgcggaagttaccggcaataatttcttgcccctgacgggtcagttccgccacgccgataacaataaacagcgaagtgtctttaatgctgatgatccactggttacccagcggcggcagcatacgacgcagtgccagcggtaaaatgacgtagcgaatggtttcccaacgtgaaagaccgagcgccagtcctgcttcacgaaaacctttgtgaatagacagcaccgcaccacgcgtgatttccgcaatgtacgcgccggagttgatcatgatggtgaccaccgccgcagtaaacgggtcgatgcgtaaatcgttaaacgccatcggcagggcgaaatagataaacatcacctggacgacgataggtgtgccgcggatcacttcaataaagaccagcgcgacgtggttggctatccaaccaccgaaggtgcgtgcaaaacctgccaacaatccgatcaccagaccgccagccagaccgaggaccgaaatccacagggtcattttggcaccttcaatcagaagcggaatggcaggccagatggcactccagtcaaactgcatatgttgttcctgttaccgtggtgtaaataatcaaattcagggtaattaatggccccggagcgggtttgcgcccttcaccctaatcctctccccggcggggagagggaactgccagtgcgctttacaggcgcagcgttattatttcggttcagtaccgaaccattttttgtagatttcgttgtaagttccgttctcgcgcagggttttcaacgcgccgttgactttgtcacgcagctcgtcgctacctttcgggaacgcaataccgtattgctgtgcttccagagagtcacctaccgctttgaactgaccgttaccggcggttttgatgaagtacagaatgtttggcgtatcgtgcagaacggcgtctgcgcggttggtgcccagttccatataggcgttatcgatgttcgggaactgacgcagatctttagttttgatgtttgctttcgcgtaatcaacggagccagttccgctcttcacagcaaccactttcccgtcgagatctttcacgcttttcacatcgttattgttagctttcaccatcactaacaggccgcttttgtagtagccgtcagagaaatcgatcgcttttttacgctcgtcggtgatggtaatgcccgccagcgccagatcgacgtttttggtttgcagtgccggaatgatcccactgaaatccatcggcttcagttcgtaatccagcttcagttctttagcgatggcagcccacagatcaacgtcaaagcccacgtatttatcgccctgtttaaattcaaacggaacgaaggcagtatccgtcgcgacaactaattttttatccgcggcatgagaagaaaccgcaaaagccagggtcagtgcagccagtgaaacttttaatacagacttcatagcatttccttttttctatccacgggacgatcccctgcgtgacattcacatatatgaaaaaatcgtgccagttttgcaactcattgatttttcgagatgcggcaaaaacgtgatgcacgatttatagggcaataccctgaagatgcaccattctggggcaccaaactggtgcgctaaaattgtgcactcaacacagtgattatttagcgtaaaacatgatgaaaaaacaatctttatgtaacgattgtgtgatgatgtggatacaaaaaatttacttaaccagctggggatagcagatggatgcactaaataagtgcgttgaggcgggctacaaaacaaaacggcctcctgtcaggaagccgcttttatcgtgtactaaagttctgcaccatcagcgatggatttattcgatgttagactcgataaaccacaggaatttatccaggtcgcgagacgcggcggtcaggatatctgcggtgtcgtcatctttcgcttcgtcaatcgctttgcgtacgtcattagcgacgattgcgtaacggtcagccagctctttcaggtgatcctgaacgttgtggatgtccagcgggtaacttttcagcggagttttgctgttgataacttgagtggtccccagagctacaccgcccagctgcactgcacgttctgccatggtatccagatgatcgatcagtgcagtgcggaagccatccagcatttcatgtacggcaatgaagttagcgccgcgcatgttccagtgcgcttgtttggtaatcaaagaaagatcaataaactggataacctggcgattcagcaactctactgttgcttttttctcgctgtcagagacatcgttgcgggtataaagcagattggtcgcttttgatttaactaatttagcggtactcataatttcatatcctcttgatgttatgtcccagtaattaacgagactaagtatagcaccagctatgtgttccgctattctggctgttcctatcacactaatagtggtaacaagcgtgaaaaaacaaaaccaataaaaaactcaatgagttagatatattaataagaacaattcttatttatttgctcgccaggaattttcggaataaatatgcttttgcataattcgatatataaagacggcgtagaggaaaagtagcgagaaaatctgcatggttatgcataaccatgcagaaatgtaaatttaatttatgtctaattcttttattttgctctctttgcgtactgtcagcgtagaacccattgaagcggcgatgatagcgccgagcgccagcagctgtatgggtgtcagtgtttctccgaggaaaatcatcccggaaacggcagccagcgcaggttccatgctcattagcgtaccaaatgtgcgtgttggcaaacgggtgagggcaatcatttccagcgaataaggcagagcggtcgagagaatagcgacagccagacccaatggaataaccgaccagtgccagagtgcttcaccagcctgaagcgctccaattggcacgaaaattaacgctgcaatcaacgaaccaattgccaccgtcgcagggccatgttccgctcctgcgcgttgcccacttaaaatgtaaatagcccaacaagccccggcccccagtgccagcgcacagccggttaaatcgacatgggaaacgtcttgccccagcggtagcaggaaccacagaccaagaaccgccagcacaacccagacgaaatctaccgggcgacgagaagagaacagtgccaccgccagtggtccggtgaactccagcgccaccgcaatacccagcggtaccgtctgaatagaaagataaaaaagataattcattccacccagcgaaacgccgtaaaacaacagcggtaatcgttgctctttggcaaagcgcagtcgccatggcttaaagaacgcgatgaggatcagcgtgcctaatgccagacgcagcgcagtgacccccggtgcgcccaccagaggaaaaagtgacttagctaacgaggctccaccctgaatagacgccatggcaacgagcaatatgactattggtaaccagaccggcattttacgtaatgaaccaggcatcctttctcccacaaatatctaaacctaagtaaagcgtggagtgtactggatatacccaatgctggttgagcatttgttgaaaaaattttcccccgttttgactaaaatgcgccaggattgatggaatcattagtctggtgattaggaataatctggatgaatgacagggaaaacatgcgtaatacttacgcagttctctgaaaaagtgatttaaatttagatggatagcggtgtatggaaacgttctgttacatgaaatggcccgttagacatcataaatcgcgaagagtttcccattaatttttgatatatttaaaacttaggacttatttgaatcacatttgaggtggttatgaaaaaaattgcatgtctttcagcactggccgcagttctggctttcaccgcaggtacttccgtagctgcgacttctaccgtaactggcggttacgcacaaagcgacgctcagggccaaatgaacaaaatgggcggtttcaacctgaaataccgctatgaagaagacaacagcccgctgggtgtgatcggttctttcacttacaccgagaaaagccgtactgcaagctctggtgactacaacaaaaaccagtactacggcatcactgctggtccggcttaccgcattaacgactgggcaagcatctacggtgtagtgggtgtgggttatggtaaattccagaccactgaatacccgacctacaaacacgacaccagcgactacggtttctcctacggtgctggtttgcagttcaacccgatggaaaacgttgctctggacttctcttacgagcagagccgtattcgtagcgttgacgtaggcacctggattgccggtgttggttaccgcttctaatcacttcggtgatataaaaaatccgcctctcggggcggatttttttgttttaaggtttcgggtcgaaaatatcggttccgagatggttgtaatccaccttctgtaactggaagttggtgatgtatatcggcccggctttcttctcagatataaacgggtatttgatatttatttccttcgctttaattcccgtccactgcgagaaaaagcctaagaagtcattggccgagcggcgggctttaatcacccgatgcgctttatcgtcgctggaaatgaccataaaaggcacctggaaattttgctgatacttatcatcatgggcaaggtattgcacgtctttgccgcgctctttaaaggccagaccgtggtcggaaaagtaaaccagcgagaagctgctgccgctgttgcgtaactgatcgtacagcttgcgcagtaaatcgtctgtttgcgtcatggtatagagatagcacgacgtttctttcgattgcacaaaggtttcgtatttgccttgtgtccggtcgcaggcctgcggatgcgagcccatcagatgtagaacaatcagctgcggttgcgagtgctcttgcgccagcacttgagcggtcatatccagtaacgcttcgtctttcgtgtttttatctgcttcaaaattaccttctttcaggaagtacacttcatctgctcgtttggcgatgctggcgatggcggtatcgtattcgccgatttgaccctggttggaaaaccaccaggtctggaagcccgcgcgatttgccagggtgacaaagttatcctgaaactgtggtttgccatcgacaacgcgattgagcgttaagccaagcgatttctgcgtggagccactggcggcaatgtagtcagcaaatatcaaaccgttaacgctgctggcaaacggggtattgtcccagtgaccgccaaaggcaccgagggcatcgcgacgcgcgctttctccgatcaccaccacataggtctgatacttcggcttaacggcagtgaccgtccaggtatctttcattccggaaagttttgccatccgttcttgctcttcaatcacctcgttattattgacgatgacatccttagcaaaacgaaataccggatagccagtatctttcagtttaaatacgccgccccaggccaggttttgcacgggagcaacaaaaaatgtcgccacactgaataccaggcacaggctgtcgaaggtattccagcgcgctttttcactctctttttttcgcctgattgctattacgccgagcgcaaaaataaatatgccgaccaggtagctgtaccacggaaaaatcgtcaggatttcggtcgactcttccatattggtggagtgcaatgccagcaatgtattgaagttaggcgcgccgtaggcctgagcaaaagggaaataacaagccgccaccagcgaactgataccgaccagaactttttgtacgcgaggcaatgttcgccatagcaaaagcaaaatagccgtaaacgcagcggtgtagagcaaactgaaggggtaacctaagccgaggttaattaatagcgactgtaaaaagtagaacgcagtccacgggctaaatacccggctacgggtaacaagcgattctttgagggttaaattcatatgccactatcgtaacaaacgccatgtgcttaccctggcgtcaagggtcaatacctgcaagagtgcgtgaagaggggaaaggggtccgcatccgcgagccgcaatatacgcagggctgcaagaagatagagcgagctgctgttcaggtcaactaccgacgaacaaatcttttgcgaaggggattgcaaatccgacaaaaagtggggtttttcagaccaaaacgcgttgtgcctgcataaaagcaggagtgaagcggcgtaccgcgacgccgctatttatcggaaggtttatcctgctgcggtttgttgttgaccatatcgcacaacatagagagcagcattaaccgtactttaaagggagaatgactaaacacgcgcatacacctcttgaactcattcataagacctcctgacttgctaatcccatcgatccttgaggaatgattgcattacatacagatatagcacaggctatattatatagctattgctaaaacgttaattttttgtaccttcgcaactctggtttacaatgtgcgcacgaaatgagaacgctatgtatgcgtcaccataatgaggaagcacaatgagtcgtcgcgcaggtacgccaacagcaaaaaaagtgacgcagttagtgaacgtggaagagcacgttgaagggttccgccaggtcagagaggcgcatcggcgcgagctgattgatgattacgttgagctgatttctgacttgatcagggaagtgggggaagctcgtcaggtggacatggctgctcgtctgggggtttcgcaaccgacggtggctaaaatgcttaagcgactggcaaccatggggctgattgaaatgatcccctggcgtggcgtgtttttaacggcagaaggagagaagctggcgcaggaaagccgcgagcgacatcagatagtcgaaaatttcttgttggtgttgggcgtcagtccggaaatcgcccgtcgcgacgcggaaggtatggagcaccatgttagtgaagagacgctggatgcctttcgtttgtttacccagaaacacggtgccaaatgagcctgccttttttacgcacgctgcaaggcgatcgtttttttcagttattaattcttgttggcatcggattaagttttttcgttccctttgcaccgaaatcctggcctgctgctatcgactggcacaccatcatcaccttaagcggcctgatgctgctgaccaaaggtgtcgagttaagcggttattttgatgtgctggggcgcaaaatggtgcgccgttttgctacggagcgtcggctggcgatgtttatggtactggcggcagcgctgctttctacctttctgaccaacgatgtcgcactgtttatagttgttccgctgactatcacgctaaaaagactgtgtgagattccggttaatcggctgattatttttgaggcgctggcagtcaacgctggttcgctactgacgccaattggcaacccgcaaaatattcttatctggggacgttctggtctttcgtttgccggatttattgcccaaatggcaccgctggctggcgcaatgatgctgacactcctgctgttgtgctggtgttgtttccctggaaaggcgctgcaataccatacgggggtgcaaacgccggagtggaaaccgcggctggtgtggagttgtctggggctgtatatcgtctttctgacggcgctggagttaaaacaagagctgtggggactggtgattgtggcggcgggctttgcgctgctggcgcgtcgtgtggtgctcagtgtggactggacgctgctgctggtgtttatggcgatgtttatcgacgtccatttactaacccaactgccagttttgcagggggtgttaagtaacgtgagtcatttatccgaacccggattatggttaacggcgatcggtttatcgcaggtgatcagtaacgtgccgagtaccattttgctgctcaattatgtgccaccgtctttattactggcatgggcggtaaacgtggggggctttggtttattacccggatcgctggcaaatttgattgcgttacggatggcgaacgatcgccgtatctggtggcgttttcatctttattcgataccgatgctgttgtgggcggcgctggtgggatatgttttgttggttatgatcccggcgggataaggtctggcaaattaaaaaggcggattatgagtccgcctttgttttacgttttgacgattaattcagacgaaccggcatcccggaacgatttttgatcgcttcatcaagaacaacctggtcaacatctggctgaccggtcactgtctgcacgctcttcgtcagggtaattggcacaatttcctgaccttcaaactgggcttcggtggtagacagcgggttatggacttcaatgtaacggctgccgtctggttcggtagtcgctttcaccggctcatcaataaactgcacgcgagtaccgacaggcactttctcgaacaggaatttaatgtcttcgttacgcagacgcacacagccatgacttacacgcaggccgataccgaagttggcgttggtgccatggatagcgtacaggcgaccgatgtagagtgcatacagacccatcgggttatccggacctgctggaacgacagccggaagcggttcgcccgcagcgcggtactctgcgtgcattttggcggtcggcgtccaggtcgggcctgcttttttacgctcaactttggtggtccagttgataggcgtgtctttgcctaactgaccaatgccgatcggcagcacgataacggtgttggttcctttcggatagtaatacagacgcatctctgcactgttaatgacgatgccttcatgaacggtatccggcaggatcagctgctgcggaatgttcagtacagtaccgcctttcggcaggaaggtatccacacccgggttcgcttccatcatattggaaagtcccatctggtactcggcggcaaaatactccagcggctgagtgttaccttcaggaatggtgatcacctgattctgaccaaccaggcgactcccgtcggttggcagaggataagttaccgcagaggcggtactgcaaaagccgacaacagcgaaggccgctgcgaataatgttttcaatttcatattcatgttaagcgagattttgtgcctggcaggccattgggttgagaatattagagtattggaagcgcattataagttcattccagctcacagtgaaatcagatgtgtacgaaatcacattttttgcctttggcttgagtgtagaccttaagcgaggagcaggatcttctttcagatttatggcataatgcgcggtttgtcatatctcttttcaggatacgcctgtgttagtttccagtaacgtcaccatgcagttcggcagtaagccgttgtttgaaaacatttccgtcaaatttggcggcggcaaccgttacggcctgattggcgcgaacggtagtggtaaatccacctttatgaagatcctcggcggcgacttagagccgacgttgggtaacgtttccctcgatcccaacgagcgcattggtaagctgcgtcaggatcagtttgcctttgaagagttcactgtgctggatacggtgatcatggggcataaagagttgtgggaagtgaagcaggaacgtgaccgcatctatgctttgccggaaatgagtgaagaagacggctataaagtggccgatctggaagtgaaatacggcgaaatggacggttactctgcggaagctcgcgctggtgaactgttgcttggcgtgggaattccagtggaacagcactacggcccgatgagtgaagttgctcctggctggaagctgcgtgtgctgctggcgcaggcgctgtttgctgatccggacattctcctgctcgacgaaccgaccaacaacctcgacatcgacaccattcgctggctggaacaggtgctgaacgagcgtgacagcaccatgatcatcatctcgcacgaccgtcacttccttaacatggtttgtacccacatggcggatctggattacggcgagctgcgcgtttatccgggcaactacgatgagtacatgacggcggcgactcaggcgcgtgaacgtctgctggctgataacgccaagaagaaagcgcagattgctgagttgcaatctttcgttagccgctttagcgccaacgcctcgaaatctcgccaggcaacttcgcgcgcgcgccagattgataaaatcaaactggaagaggtgaaagcctccagccgtcagaacccgttcatccgttttgaacaggataagaaactgttccgtaacgcgctggaagtggaaggtctgactaaagggtttgataacggtccactgtttaaaaatctcaacctgctgctggaagtgggtgaaaaactggcggtactgggtaccaacggcgtcggtaaatcaacgctgctgaaaacgctggtgggcgatctgcaaccggacagcggcaccgtaaaatggtctgagaacgcgcgcattggttactacgcccaggaccatgaatatgagttcgaaaatgatctgaccgtgttcgaatggatgagccagtggaagcaggaaggcgatgacgagcaggcggtacgcagcattctcggtcgtttgctgttcagccaggacgacatcaaaaagcctgcgaaagtgctttccggtggggaaaaagggcggatgctgtttggtaagttaatgatgcagaagccgaacattctgatcatggacgaaccgaccaaccacctggatatggaatccattgagtcgctgaacatggcgctggaactgtatcagggcacgctgatctttgtttctcacgaccgtgagtttgtaagctccctggcgacccgtattctggaaatcaccccggaacgcgtgatcgactttagcggtaattacgaagattacctgcgtagtaaagggatcgagtaagttattatcagtagccctgatatggtcagggctactgaaactgatgacaaacgcaagattgcctggtgcgctacgcttatcagacctggcagtgtatcgcaatatattgaattttcatgattttgtatgccaaataaggcggtcacgccgtatccggcataatgacatgcactttctcaataaactgaattggcgataatcaaagattaaacggcggtttattttccagcaccgcctgaatcacattcagcgtgccttcatgattattatcatcggtagcgtaacgggcgatttgtttaatgttttccgcagcattgctcatcgcaaaggaataacgcgccattttcagcatctccgcatcgttaccgctgtcgccaatcgctaccacattttgcggtgacagatcccagcgtttcagtaaccgcgaaataccgtttgctttatgtagaccgggaataatcaagtcgataaagctaaaaccactggtgacgggtttcataatgccatccagcgctatgtgcagtttgtcgatcactaacgggatttgttcatccggcaggttgagcgaaaacttgaacagtacgtcgtcaatctcctgataatcttttacaggtttcaggcgatggtagtgttttgccatcagtgcgacgaatgcttcgggggcattttcgctgacatatgcactttgcagaccgcaggcgacaaaattgagttgcttatcttttagcaactcgccaataacaatccgcgattcatgtcgggtcagttcgccgtggaacaactgcttgccatgttcgtaaaccagtgcgccgttttccgcgacaaaagagatctcatcctttagctcaggaaagaacgaaataagctggtaatactgattaccgctggcgacaacgaactcaatgccgcgctttttcagttcctgatattgcgccataaaacgtggttggttgtacgttttggcgtcgttaagaaaagtaccgtccatgtctgtgacgataacttttacgctcataggtgtgctcctggctcgaaaatgaaaccgtaacagtgtaataacaatgtgacgcagagcacaaattatatttcgaatgaaagcgaggctgaaattgatgatgtgaatgatttggcccggcgacgacgacgccgggctgaggggattacagcatgtgttcggtacgggcgatgatatcgtcctgtgcgtctggagagagcgcggtgaagaaggcggaataacccgctacgcgtaccaccagatcgcggtattgatccggatgtttcttcgcctccagcaatgtttcgcgggaaacgatgttgtactgaatatgccagcctttatgcacttcaaagaaggtacgcagcaggatcatcagtttctgcttgtcagattcattctccagcgttgccggattcagtttctggttgagcagcacgccgccgagaattgctgccgtaggcagtttacccaccgagccaatgaccgcagtagggccgagatggtcagtaccggaggccggactagcgccttctgccagcggggtatgtgctttacgtccgtccggcgttgccatagtctgcgcgccaaacggtacgttagcggagatagacgatgtgcccgcataatagttgccgccaatcggaccacgaccgtagcgcgggttatggtactgcttcagttcgtcgatataggtctgataagcgcgagccagcagcgtatcgacagtatcatcgtcgttgccgtacttcggcgcaccgttaatcagccgctgacgcagctgctcgtgagtcaggccgtcgaagtcatccgccagtgcggcagccagctgttgctgaccaatcgcgccctgttcaaataccagtttcttcactgccgccaggctgttgccgaggttagcaatgccgacctgcaggccagaaacccagtcatatttcgcgccgccttgcttgatacttttcgctcgctcaatacagtcatcgaccagcgccgagcagagaatatcgtgtacgttctcttccagcatggtatcgacgacatattcgatttcgattgatttacgcgtgtagtaacggatttgcgtatcccatgcgtccattacttcatcgaagttgttgaagttacccgctgacaacgctttttcttgtggcaggaacactttgccgctggtggcatcacgaccgccttccagcgccgccagcatcacgcgggcgaagttgataaagctcatgccggtacagcgatagccccatttgccaccgacggcggtttcgatacaaccaatcgctgcatagtcgtaagcgtcctgcggttcaataccgagtttaataaattccgggatgacgatttcgtcgttgttgaacgccggcatcccgaagccgcagcggatcacctgaacacaggcgtcgaggaaatcgttactcatacccgcatggtaacgcacgctgaggttaggctgagtcgaacgcaggcgaccgcaagattcgaggatcgcataagagagtggatttaccgcgtccatcggttgaccatcaaccagattttgcccgccaatggtgacgttctgatacagcggacttcccgcagaggcttttgagtgtgagccggagcggattttgttcacttccagcaatttcaaccagcagctatgcagcatctcgatggcgtgttcgcgatccagtgtctggttcagttcaacgtcacggcgatagtatggatagagatactggtccatacgaccaaacgataccgagtgaccgttagattcgatctgcaaaatcaactggatgaagtaacatagttgcagcgcctgccagaaagtctgcggcggctggtgggcgataagatcgcagttttctgctatcgtcagcagttcatcgcgacggctttcgcgggtttcggtcgcggccatttcacgcgccagggcagcgaaacgttcaatgtgttcactgactgccaccagcacgatatcaatcgctttcaggaattgctcgccgtgcagatcttccagaaccgtcagattgatgcgcgagcgacgttccgccactttctcacgcagaccatcaagacctttttccagcagtagcgggaaattgaccgccaggtgcgcatcgccggaggtcatattgccctccgctttaatgattccggtcgccagcagacctttttgctcatcggtaaacatgccgtagcagcgatcctgtacggtctgaccgcgccaccacgggcacacttcatgcagaacgcgtttgttctcttcgctcaccgcaaaaccagcaccgggacgatctgccagatcatcaatctctttttcgatccacgagacggtatattccgggaagatcggcgcggcgcgaacttcgcttgcctggttgccaatgatcaactcatcgtgcttgatccagatggtgcgattcgccaggtgatgcgccagtgccagcgcgcgacgtaccgggattggcttatcgagatgttgttgatacatctcggtatagtgttgtgctcgttcggtacagaccggcggtttcacaatatgcaccagcgcatttttgtgcgctttaatgcggtcgctgagcgtatccagttttagtgttgtcatgattgttatcctcgtaaggtcgcggttaaccctttctggcaggcatactgctgggcaaagtcgagcagttctggcgcatcaagcggtttttccggggcgtcatagggcagattaagtaagtgatatttgttgatgcccagtgtgtggtagggcagaaaatgaatttcgctaacgtgcagctcgtcggcggcaaaatcggtaatggctttcacagaagtttcgtcggcattaaagccctgaatcagtggcacgcggataatgatttttttgccggctgcggcgagttttttcaggttatccagcaccctggcggcgttaccgtcggtccactgtttaaacggcgcgtcggcaacgtgttttaaatcggcaagaaacagatcgatatagggcagagaaggggcgatatatttccacggcacatgcagacaggtttctaccgcagtatgaatgccggcctcgtggctggcttgcagcagcgccgtcgccatttccggctgcataaacggttcaccgccagaaagcgttaagccgccgccgctgcgatcgtaaaacggtttatcgcgcaaaacggttgccatgatctcctcaacgcttttcacttcaccacacacggttaacgcctgtgtcgggcagcagtcggttagcgccgtaaaatgctccggggttaacttttcccgatgaataagcaaaccattcaacgcgcgctcaatcacttccggtgcggtcttagcgcacagcttacagccttccagacagagtcgtgggtcatacagcagatcctgcgtgcgggcgcggctttccgggttctgacaccagcggcagcccagcgaacagcctttaagaaatacgaccgtgcggataccggggccatcatgggtcgagtagcgttgaatattgaaaatcatagttgcctctctgtttcgttcaaacattaaaatactttcgaatgaaagttagattgatgtgcgtcaactgttcagagagttttcccgtgatagtctacattcagacaaaaagtacattttgaggatggttatggaactgtatctggatacttcagacgttgttgcggtgacggcgctgtcacgtatttttccgctggcgggtgtgaccactaacccaagcattatcgcagcgggtaaaaaaccgctggaggttgtgcttccgcaacttcacgaggcgatgggcggtcaggggcgtctgtttgcccaggtaatggctaccactgctgaagggatggttaatgacgcacgtaaattgcgttctattattgcggatatcgtggtgaaagttccggtgaccgctgaggggctggcagctattaagatgttaaaagcggaagggattccgacgctgggaaccgcggtatatggcgcagcacaagggctactgtcggcgctggcaggtgcggaatatgttgcgccttacgttaatcgtattgatgctcagggcggtagcggtattcagactgtgaccgacttacaccagttattgaaaatgcatgcgccgcaggcgaaagtgttagccgcgagtttcaaaaccccgcgtcaggcgctggactgcttactggcaggatgtgaatcaattactctgccgctggatgtggcacaacagatgattagctatccggcggttgatgccgctgtggcgaagtttgaacaggactggctgggagcgtttggcagaacgtcgatttaaccggacgttctgcatcctcataaattgctgatgacgtggcggagtgccgcgtctcatccggcctggaggtggcagttactgcccgcacacctcacaccccggattacgcatcagtttcatttcgcgaaactgacaggtcatcgcatcgtacatcacgatttttccgctggccggtttgccataacctgccagcagtttgatcgcttccattgcctgcaacgaaccaatcaccccgatcaacggtgccatcacgcctgcttctacgcaggttaacgcgttctcgccaaacaaacggctaaggcagtgatagcacggttcgccgtcctgataagtgaagaccgtgatttgcccttccatacgaattgccgcgccggaaaccagcggcaccttcgcggcaaaacagcctgcgttcagttgattacgtactgcaacgttatccgtacagtcgagcaccagatcgtgttttgcaatcatcgcagcaagttcagcgtcatcaagcagcgcattgactggcgtaatcgcgatatgtgggttgatccgcgtcagggcgtcacgggcggattccacctttggttgcccgaccgtggcatcactgtgcagcgtctggcgttgcagattggagagcgaaaccgtgtcgaagtcgagcagcgtcaggttgccgacaccggcgcttgccagatactgcgaagctgcgcagccgaggccaccaagccccaccaccaacacgcgagaatccttcagcgcctcctgaccgtcaaaatcaaaaccgcgcagaatgatttgccggttgtagcgcagcatctcctgatcgctgagttccgccattacaggcctccgaacaacgcgttaaacggttctacttccacccattcgcccacttccacattgccgcgatcgcgttccagcacgataaagcagttgccgaggctaaaggagctaaatatatgtgaaccctgatgtccggtggtcgtcacttccagttcgccatcggcgttgcgttgcagcacgccgcgctggaaatcaaggcgtcctggcgtttttttcaggcgggacgctgtgcgtacacgctggcgcgcgggcaggccactggcggtattgccgcttagttttgccagcaaaggctgtaccagttgatagaaggtcagcgtcgctgaaaccgggttgcccggcaggccgcagaaccaactattagaaagtttaccgaatgcgaacggtttacccggtttaatcgccagtttccagaaggcaatctcccccagctcttcaagaatcgttttggtgtaatccgcttcacccactgaaacaccgccggaactgatcaccacatccgcttggctgtcggcttcaataaatgcggcgcgcagggcatggggatcgtcgcggataatccctaagttgattacctcgcatcccaactgttctaacatcaggtgtacggcgagacggttggtatcgtagatttggccgtcgcccagcggctgaccgggcaactggagttcatcaccggtagaaaaaagcgctacacgcactttacgaatcaccggaacttcggcaatccctagcgaagcaatcactggcagttcagcggtagtcaggcgagtccccgccgggaaaacaaccgcacctgcagagatatcttcaccgcgacggcgaatattttgcccgctacgcgcttcagcagtaaaacgcacgccattgtccgtttgttcagtctgctcctgcatcaccaccgcttcgcagccttccggcaccggcgcaccggtcataatacgaatgcaggtacccgcaggccattcaccatggtacggctgaccggcaaaggatttaccggcaacgggcagcggttgcccggaggcaatatcggctaaacgcaccgcgtagccgtccatagcggagttatcaaaccccgggacatccagtggcgaaacgacatcgctcgccagaatacggccaaaacactgaaccagtggcagcgtttcctgggcggtcagtggggtaacgcgagaaagcatctcattaagcgcggtgtcgagcgacatcaatccggtggtaaattccatgaaaacactcctgcggaggcaaaatcgaatttgcctattatgtcagaaaaacgccacagactgtatgccacctcgggcgtagcgctggctcctgcctttacatgccatatccatctttctatattcaaaaattgaatgagtcattcataaaaattctgatatttatagcaaaagtggcgagccacccttaatggacgaatactatgggcaaagcagtcattgcaattcatggtggcgcaggtgcaattagccgcgcgcagatgagtctgcaacaggaattacgctacatcgaggcgttgtctgccattgttgaaaccgggcagaaaatgctggtagcgggcgaaagtgcgctggatgtggtgacggaagcggtgcgtctgctggaagagtgtccactgtttaacgccggaattggcgctgtctttacgcgtgatgaaacccatgaactggacgcctgtgtgatggatggtaacaccctgaaagccggtgcggtggcgggcgttagtcatctgcgtaatccggttcttgccgcccgactggtgatggagcaaagcccgcatgtgatgatgattggcgaaggggcagaaaattttgcgtttgctcatggcatggagtgcgtctcgccggagattttctccacacctttgcgttatgaacaactaatggcagcgcgcgaggaaggggcaacagtcctcgaccatagcggtgcgccactggatgaaaaacaaaaaatgggcaccgtaggggccgtggcgttggatttagacggcaatctggcggcagccacgtccacgggcggaatgaccaataaattacccggacgagttggcgatagtcccttagtgggggccggatgctatgccaataacgccagtgtggcggtttcctgtaccggtacgggcgaagtcttcatccgcgcgctggcggcatatgatatcgccgcgttaatggattacggcggattaagtctcgcggaagcctgcgagcgggtagtaatggaaaaactccctgcgcttggcggtagcggtggcttaatcgctatcgaccatgaagggaatgtcgcgctaccgtttaacaccgaaggaatgtatcgcgcctggggctacgcaggcgatacgccaaccaccggtatctaccgtgaaaaaggggacaccgttgccacacagtgatgaacttgatgccggtgatgtgctggcggttgaaaatctgaatattgcctttatgcaggagcagcagaaaatagctgcggtccgcaatctctcttttagcctgcaacgcggtgagacgctggcaattgttggcgaatccggctccggtaagtcagtgactgcgctggcattgatgcgcctgttggaacaggcgggcggtttagtgcagtgcgataaaatgctgttgcagcggcgcagtcgcgaagtaattgaacttagtgagcagagtgctgcacaaatgcgccatgtgcgcggggcggatatggcgatgatatttcaggagccgatgacatcgctgaacccggtatttgctgtgggtgaacagattgccgaatctattcgtctgcatcagaacgccagtcgtgaagaagcgatggtcgaggcgaagcggatgctggatcaggtacgcattccggaggcacaaaccattctttcacgttatccgcatcaactctctggcgggatgcgccagcgagtgatgattgcgatggcgctgtcatgccgcccggcggtgctgattgccgatgagccaaccaccgcgctggatgtcactattcaggcgcagatcctgcaattaatcaaagtattgcaaaaagagatgtcgatgggcgttatctttatcactcacgatatgggcgtggtggcagagattgccgatcgggtactggtgatgtatcagggcgaggcggtggaaacgggtagcgtcgaacagatttttcatgcaccgcaacatccttatacccgtgcgctgttagctgctgttccgcaacttggtgcgatgaaagggttagattatccccgacgtttcccattgatatcgcttgaacatccagcgaaacaggagccacccatcgagcagaaaacggtggtggatggcgaacctgttttacgggtgcgtaatctggtcacccgtttccctttgcgcagcggtttgttgaatcgcgtaacgcgggaagtgcatgccgttgagaaagtcagttttgatctctggcctggcgaaacgctatcgctggtgggcgagtctggcagcggtaaatccaccaccgggcgggcgttgctgcgcctggtcgaatcgcagggcggcgaaattatctttaacggtcagcgaatcgataccttgtcaccctgtaaacttcaggcattgcgccgcgatattcagtttatttttcaggacccttacgcttcgctggacccacgtcagaccatcggtgattcgattatcgaaccgctgcgcgtacacggtttattgccaggtaaagaagcggctgcacgcgttgcgtggttgttggagcgcgtgggcctgttaccggaacatgcctggcgttacccacatgagttttccggcggtcagcgccagcgcatctgcattgctcgcgcgttggcattgaatccaaaagtgatcattgccgacgaagccgtctcggcgctggatgtttctattcgcgggcagattatcaacttgttgctcgatctccagcgtgatttcggcattgcgtatctgtttatctcccacgatatggccgtggttgagcggattagtcatcgtgtggcggtgatgtatctcgggcaaattgttgaaattggtccacggcgcgcggtctttgaaaatccgcagcatccttatacgcgtaaattactggcggcagttccggtcgctgaaccgtcccgacaacgaccgcagcgtgtactgctgtcggacgatcttcccagcaatattcatctgcgtggcgaagaggttgcagccgtctcgttgcaatgcgtcgggccggggcattacgtcgcacaaccacaatcagaatacgcattcatgcgtagataacattcaggcggagaataaaatggcaagagctgtacaccggagtgggttagtggcgctgggcattgcgacagcgttgatggcatcttgtgcattcgctgccaaagaggtggtggtggcggtgggatcgaacttcaccacgctcgatccgtatgacgcaaatgacacgttatctcaggccgtagcgaaatcgttttaccaggggctgttcggtctggataaagagatgaaactgaaaaacgtgctggcggagagttataccgtttccgatgacggccttacttacaccgtgaaactgcgggaaggaattaaattccaggatggaaccgacttcaacgcagcggcggtaaaagcgaatctggaccgggccagcgatccggcgaatcatcttaaacgctataacctgtataagaatattgccaaaacggaagcgatcgatccgacaacggtaaagattaccctcaaacagccattctcagcgtttattaatattcttgcccatccggcgaccgcgatgatttcaccggcagcgctggaaaaatatggcaaggagattggttttcatccggtgggaaccgggccgtatgaactggatacctggaatcagaccgattttgtgaaggtgaaaaaattcgcgggttactggcagccaggattgcccaaactggacagcataacctggcgtccggtggcggataacaacacccgcgcggcaatgctgcaaaccggtgaagcgcagtttgctttccccattccctacgagcaggccgcactgctggagaaaaacaaaaatatcgagttgatggccagtccgtcaattatgcagcgttatatcagtatgaacgtgacgcaaaagccgttcgataacccgaaggtccgtgaggcgctgaattacgccattaaccgcccggcgctggtgaaagtggccttcgcgggctatgcaacgccagctactggtgtggtaccgccgagtatcgcctacgcgcaaagttataaaccgtggccttacgatccagtgaaagcgcgcgaattactgaaagaggcgggatatcccaacggtttcagtaccacgctgtggtcgtcacataaccacagcaccgcgcagaaagtgctgcaatttacccagcagcagttagcgcaggttgggattaaagcccaggtgactgcgatggatgccggacagcgggcggcagaagttgaaggtaaagggcaaaaagagagcggcgtgcggatgttctacactggctggtcggcttcaaccggcgaagccgactgggctctatcgccgctgtttgcctcgcagaactggccaccaacgctgtttaataccgcgttttacagcaataaacaggtggatgacttcctggctcaggcactgaaaactaatgatccggcggaaaagacccgcttgtataaggcggcgcaggatatcatctggcaagagtcgccgtggatcccgctggtggtagaaaaactggtgtcggcacacagtaaaaacctgaccggtttttggatcatgccagacaccggcttcagctttgaagacgcggatttgcaataagcaacgcagggagtggaatgcttaattacgttatcaaacgcttactggggttgattccgacgctgtttatcgtctcggtgctggtgtttttatttgtccacatgctgcccggcgatccggcgcgattaattgccgggcccgaagctgatgcgcaggttatagaactggtgcgtcagcagctggggttggatcagccgctatatcaccagttctggcactatatcagcaatgctgtgcagggggattttggcctgtcgatggtgtcgcgtcgtccggttgccgatgagattgccagccgctttatgccaacgctgtggctgaccataaccagtatggtctgggcggtgatatttggtatggcggcgggaattatcgccgccgtctggcgtaaccgttggccggatcgattgagtatgactattgcggtgtcggggatttcgtttccggcatttgctctggggatgcttttaattcaggtattctctgttgaactgggctggctgcctaccgtgggagcagacagttggcagcactacattttaccctccctgacgctcggcgcggcagtggccgccgtgatggcgcgctttacccgcgcgtcgtttgtcgacgttttaagcgaagattatatgcgtaccgcgagggcgaaaggggtgagcgaaacctgggttgtcctcaaacacgggctacgcaacgcgatgatcccggtagtgaccatgatgggcttacagtttggcttcttgctcggtggttccatcgtggtggagaaagttttcaactggcccggacttggacgcttactcgttgactccgtagaaatgcgcgattacccagtgattcaggcggaaattctgcttttctcgctggaatttattcttatcaacttagtggtggatgtgctttacgccgccattaacccggctatcaggtacaagtaaggatgcgactatttaactggcgacgtcaggcggcgttaaacgccatgccactggtcaaacctgaccaggtacgtacaccgtggcatgaattctggcgacgatttcgccgtcagcatatggcgatgaccgccgcattgttcgttattttattgattgtggtggccatttttgcacgctggatcgctccctatgacgccgaaaattattttgattatgacaatctgaataacggaccttctttgcagcactggtttggtgtcgattcactggggcgcgacattttcagccgtgtcctggttggtgcgcaaatatcgctggcggcgggcgtgtttgccgtgtttatcggtgcggcgatcgggacgttgctgggcttgctggctggatattatgaaggctggtgggatcggctgatcatgcgcatttgcgatgtgttgtttgccttcccgggtattttactggcgatcgctgttgttgcggtgttgggaagcggcattgctaacgtgattatcgcagtcgccattttttccatccccgcgtttgcccggctggtgcgcggcaacacgctggtgttgaaacagcaaacctttatcgagtcagcacgcagtattggtgccagcgatatgaccattttgttgcgtcatatcttgcctgggaccgtctcttctatcgtggtgtttttcaccatgcgcattggcacctcgattatctctgccgccagcctgtcatttctcggcctcggtgcgcagccgccgacaccagagtggggggcaatgctcaatgaggcacgagcggatatggttatcgcgccgcatgtcgctgtttttccggccctggctatttttctgaccgtactggcgttcaatttgttgggcgatggtttacgcgatgcgctggatccgaaaattaaaggatagttacgtttgaatattgcttgaaagggtaatcacctcacaggaaattattgccctaagcaagtgttgtaactttctgctgattttgtagaatcgggtaatttggttaaaaagccgcagcaagggactattttgcagcggcacagcgttcagatagttattttgttaaatgtattaacatgctgagtttatacgaaaagataaagataaggctgataattttatttttattggcagcactgtcatttattggtctttttttcatcattaactatcaactggtatcggaacgcgcggtaaaacgtgccgatagccgctttgaacttattcagaaaaacgttggctatttctttaaagatattgaacgttcggccctgacattaaaggactcactgtatttattaaaaaatacagaggagattcaacgcgccgtaattctgaaaatggaaatgatgccatttttagactcggtgggactggtacttgatgataataaatattatctcttttcgcggagggcgaataataaaatcgttgtttatcatcaggaacaagtaaatggaccgcttgtcgacgagtcagggcgggttatttttgccgattttaacccatcgaaacgaccgtggtcgatggcttcagatgactctaacaacagctggaaccccgcatacaattgctttgatcgtccgggtaaaaaatgtatctcttttacgctacacatcaacggcaaagatcatgatttgttagcggtagataaaattcatgtcgatttaaactggcgatatctgaacgagtatcttgatcacatcagcgctaatgatgaagttctatttttaaagcaaggtcatgagatcattgctaagaatcaactcgctcgtgaaaaattgattatttataatagcgaaggtaattataatattattgattctgtcgatacggaatatattgaaaaaacatcagcggtgccaaacaacgcattattcgaaatctatttttattatcctggtggtaatttattgaacgcatcagataaacttttttatctgccgtttgctttcattattatcgtattgctggtggtttatttaatgaccactcgagtgttccgtcggcaattttctgaaatgacagatttggtcaatacgctggcgtttttgcccgactctacggatcaaatcgaggctctgaagattcgtgaaggcgatgcgaaagagattatcagcatcaaaaattcgatcgcggaaatgaaagatgctgaaattgaacgggcaaataaattgctctcgctgatctcttacgatcaggaaagcggttttattaaaaatatggcgattattgagtccaacaataatcagtatctggctgtggggatcatcaaactgtgtggtctggaagctgtggaagcggtgtttggtgttgatgaacgcaataaaatcgtcaggaaattgtgtcagcgaattgccgagaaatatgcgcaatgctgcgatatcgtgacatttaatgccgatctctatttactcctgtgccgggaaaatgtacagacgtttacccgtaagatagcgacggtaaacgattttgacagcagttttggctaccgcaatctgcgcatccataagtctgctatttgtgaacctttgcagggggaaaacgccaggagttacgcagaaaagctgaaactggcgatttccagtatccgcaaccatatgttctcagagtttattttctgtgatgatgcgaaactcaacgaaatagaagagaatatctggattgcgcgtaatattcgccatgcaatggaaattggcgaactattcctggtctatcaaccgattgttgatattaacacccgcaccattttgggcgcggaggcgttgtgccgttgggtgtctgcggagcgggggattatttcaccgctgaagttcattaccattgctgaagatatcgggtttatcaatgagctgggctatcaaattattaaaaccgcgatgggtgaattcagacattttagtcagcgtgcgtcgctgaaggatgatttcttactgcatattaatgtttcgccctggcagttaaacgaaccacactttcatgagcgttttactaccatcatgaaagaaaatggcctgaaggcgaacagcctttgtgttgagatcaccgaaaccgtgatcgagcgaattaatgaacatttctatctcaatattgaacaactgcgtaaacaaggggtacgggtatcgattgatgactttggcaccggtttgtcaaacctgaaacgtttttatgaaattaatccagacagtataaaggtggattcgcaatttaccggcgatattttcggtactgcaggaaaaattgtgcgcattattttcgatctggcacgctataaccggatcccggtgattgcggaaggcgtagagagcgaagacgttgcgcgtgaattaatcaaattaggatgtgttcaggctcaggggtatctgtaccagaaacccatgccattctccgcctgggataaaagtggaaaattagtaaaagagtagtttacgtatgtccagaatcaataaattcgtacttacagtcagtctgctgatttttatcatgatttcagcagttgcctgcgggatctacactcaaatggtaaaggaacgggtgtatggcctgaaacagtccgttattgatactgcttttgcggtggcaaatattgctgaatatcggcgtagtgtggcaattgatctcatcaacacgctaaatcctacggaggaacagctgttggttggcttacgcacagcttacgccgactcggtttcaccctcttatttgtacgatgtcggtccttatctgatttccagtgatgaatgtattcaggtaaaggagttcgagaaaaattattgtgcagatattatgcaggttgttaagtatcgacatgtcaaaaatacagggtttatctcttttgatggtaaaactttcgtctattacctctatccggtaactcacaatcgtagtctgatatttttgcttggtctggaacgtttttctttactgtcaaaatcgctggcgatggatagcgagaacctgatgttctccctgttcaagaacggtaaatcggtgaccggtgatgaatataacgctaaaaacgccatcttcaccgtttcggaagcaatggagcacttctcctatttgccgaccgggttgtacgtatttgcttataaaaaagacgtttattttcaggtatgtacattgattattttctttgccgcattggtggcagtgatatcgggtgccagttgcctctatctggtacgcagagtgattaatcgtggtattgtggagaaagaagccattattaataaccattttgaacgcgtactggatggcgggcttttcttttcggctgccgatgtcaaaaaactctacagtatgtataactcggcattcctggacgatctgaccaaagcgatgggcagaaaatcctttgacgaagatttaaaagcgctgccggaaaaaggcggttatttgtgcctgtttgacgtcgataaattcaaaaacattaacgacaccttcggtcatttgctgggcgatgaagtgttgatgaaagtggtgaaaatccttaaatcacagatcccggtagataaaggtaaagtctaccgcttcggaggtgacgaatttgcggtgatttatactggcggcacgctggaagagttgctatcgattctaaaagaaatcgttcatttccaggtgggaagcattaatttaagcaccagtatcggtgtagcgcattcaaatgaatgtactaccgttgaacgtttgaaaatgctggcggatgagcggctgtataagagtaagaaaaacggcagggcgcagattagctggcagtaatcattattcgcaggccggacaaatgattttgcccggcctgaattaattaaacccggctaccccacaaatcgtactcatcggcgtgctcgactttcactcgcaggatatcacccggcttaacgttggtttcaccattgagataaaccgcgccgtcgatttccggtgcatctgccatgctgcgaccaatcgcgccttcttcgtccacttcgtcgataatcaccagaatttcacggcccactttctcttgcaggcgctcggcggaaatttgctgctgcaactgcatgaaacggttccagcgttcttctttcacttcttccggaacctggtcaggcagggcattggcgtctgcaccttcaaccgggctgtatttaaagcagccaacgcgatccagacgtgcttctttcaggaagtcgagtagcatctggaaatcttcttccgtctcgccagggaagccaacaataaaggttgagcgtagggtcagttccgggcagattttgcgccactgtttgatgcgcgccagttggcgatctacagaacccggacgtttcatcagtttgagaatgcgcgggctggcgtgctgcaacggaatgtccagatacggcaggattttgccctctgccatcagtgggatgacgtcgtccacatgcggataagggtaaacgtagtgcagacgtgtccagatccccagtttcgataactgttcgcacaggctgaccatgctggtttttaccggctcgccgttgtggaagccagtacgatgtttaacatcgacgccatacgcggaagtatcctgcgagatcaccagaatttctttaacgcccgcatcaaccagacgtttcgcttcacttaacacttcgccaatcggacggctcaccagatcgccgcgcatagacggaataatgcagaaggtgcagcggtgattacagccttcagaaattttcagataggcataatgacgcggcgtcagtttcacaccttgttctggcaccaggctcaggaatgggttgtgtttcggttttggcacgtagtgatgaacgtgctccagaacctgctcatagctatgaggcccggtgatttccagcactttcgggtggacttcgcggatctgatcttcttttgcccccagacaaccggtcacaattaccttgccgttttcattcaacgcttcaccaatggcttccagtgattcttgtaccgcgctgtcaataaagccgcaggtgttgacgatcaccatgtccgcatcatcatagctcggtaccacgtcataaccttcagtgcgtagttcggtgagaatacgctctgaatcgacaaggtttttcggacagccaagggaaacaaagccgattttcggctggggagttactttgctcatagcttaaaaaatattcagttacaggaaaggtcagggcagggattctacagagttctggataaaatttgtatcgcaatctcattcgctggcggagttgaaggaaatgtaaattttgttaattcggcgtgaagaattgctcctggacagcattttgctcaaaaaacagccatactatttagttgcaacaaggctggaaagaggaggatcgaagtatgttcgttgacagacagcgaatcgatatgctgaaccggttgatcgacgcacgcgttgacctcgccgcatacgtgcaactgaggaaggcaaaaggatacatgtccgtcagcgaaagcaatcatctacgagataacttttttaaactgaatcgcgaactgcacgataaatcgctgcggttgaatcttcatctggatcaggaagaatggagtgctcttcatcatgctgaagaagcattagcgacagccgcagtatgtttgatgagtgggcaccatgattgcccgactgttattaccgtcaacgccgataagcttgaaaattgtctgatgagcttaacgctgagtatccagagcctgcagaagcacgccatgcttgagaaggcctgaaaactaagggggagaaagcgtctcccccttcatgtttaagtttttgtaaaaatgaatttgttatctcctccactgactacgctttaagccagagtcaatccggaggcgttatgcatcgacaatcctttttccttgtgccccttatttgtctttcttccgctctctgggcagctcctgcaacggtaaatgtcgaagtactgcaagacaaactcgaccatccctgggcgctggcctttttacccgataatcacggtatgttaatcactctgcgcggcggcgagttgcgtcactggcaagcaggaaaaggattatctgcgccgctttccggagtgccggacgtttgggcgcacgggcagggcggcctgctggacgtggttttagcgcccgattttgctcagtcgcgccgcatctggttaagttattccgaagttggcgatgatggcaaagccggaactgctgtgggttatggccgcttaagtgatgatctctcaaaagtgaccgacttccgcaccgtctttcgtcagatgccaaaactgtctaccggtaaccattttggcgggcggatggtattcgacggtaaaggttatctttttattgctctgggcgaaaacaatcagcgcccgacggcgcaggatctggataaattacagggcaaactggtgcgtctgaccgacctgggagaaatcccggatgataatccttttataaaggaatccggtgtgcgcgccgagatctggtcttatggcattcgtaatccgcaaggaatggcgatgaatccgtggagtaatgcactatggctgaatgaacatggcccgcgcggtggtgatgaaattaatattccgcaaaaaggcaaaaactacggctggccgctggcaacctggggaatcaactattcgggctttaagataccggaagcgaaaggggagatcgtcgccgggaccgagcaacctgttttttactggaaagattcgcccgccgtgagcggcatggccttctataacagcgacaaattcccccagtggcagcaaaaattatttattggcgcgctgaaagataaagatgtcattgtgatgagcgtcaacggcgacaaagtgacagaagatggccgtattttaacggacagagggcagcgaattcgtgatgttcgcactggacccgacggttatttatacgttctcaccgacgagtccagtggggaattacttaaagttagcccacgcaattagctaacgggaatcatcaccactttgcgcactgcggggcgttcagtgagttgctgataccagcgttgcagatttggacgcggtgtccaggtcaggccaacgttaaacaaattgtagatgaacggtgcgatagcgatatcgcccacaccaaactcgtcgcctgagaaccattttacttttgccagttccgcatcgagcagggcaaacagggcgtcgcactctttgcaactggcatcaatggcggcctgatcgcgctcttccggtggtgttctgactaatcccatcaggatcccgcgatgagcattactgagcgtctggtttgcccagtccatccatttttctgcttccgcacgacgtgccggtgagtcgatccacaggcgtttttgcccgtactgtgccgccagatagcggacaatggcgtttgattcccaaagaatgagatcactttcgtcgtcacgcaacaacggcaccagcccgttagggttcatcgccagaaaatcagcatcgtgatttatcccaaactcacggcccgcgagaatttgctcataaggtagttccagttcttcgagcgtcagcaatactttttttacgttggttgaattattccgaccccacagcgtaatcatactcaccccttttccgacaggcagccacaggctgaacaggactccgatggtgaagtaaagttaacttttaagcaacagctggcaaaaaaatgacaccagaagcagcgaagcggcaggatattgcataaactttaaaaactttaccaacttacggtttctttaagtttgtgtgtgcgttattaatcaccgaacttatcatacggcgatataacgtattttttttgaatggatactcgggtggcatttatgacgcaatactcctctctccttcgtggtcttgcagcgggttctgcatttttattcctttttgccccaacggcattcgcggcggaacaaaccgttgaagcgccgagcgtggatgcgcgtgcatggattttaatggattacgccagcggtaaagtgctggcagaaggcaatgcggatgagaaactggatcccgcgagcctgactaaaattatgaccagctatgtggttgggcaggcgcttaaggccgataagattaaactcaccgatatggtgacggtcggtaaagatgcctgggcgacgggaaatccggcactgcgtggttcatcggtaatgttcctcaaaccgggcgatcaggtttcggtggcagacttgaacaaaggtgtgattatccagtccggtaatgacgcctgtattgcgctggctgattacgttgccgggagccaggagtcatttattggtttgatgaatggttatgccaaaaaactgggtctgaccaacactaccttccagacggtgcacggcctggatgcgccggggcagttcagtaccgcgcgcgatatggcattgctgggtaaagcattgatccacgatgtgccggaagagtacgccattcataaagagaaagagttcaccttcaacaaaattcgtcagcctaaccgtaatcgtctgctgtggagcagcaatctgaatgttgatggcatgaagacaggaaccacggcaggcgcgggatataatctggttgcttcggctacccagggcgatatgcgtttaatctccgtagtgctgggggcgaaaactgaccgtatccgttttaatgagtctgagaaattattgacctggggcttccgtttctttgaaaccgtgacgccaattaaacctgatgccacatttgtgactcagcgcgtctggtttggtgataagagcgaagtgaatctcggggcaggcgaagcgggctcagtgaccataccgcgtgggcagctgaaaaacctgaaggcgagttatacgttaacggaaccgcagcttaccgcaccgctgaaaaaaggtcaggttgtcggcaccattgatttccagcttaacggtaaatccattgagcagcgtccgctgatcgtgatggaaaatgtggaagagggcggattctttggtcggatgtgggatttcgtgatgatgaaattccatcagtggttcggcagctggttctcttaatcttctgataaccggatggcgcgaaacgtcatccggttatacgtcattaatacatcaacttaatacgctgcgtctgcgcgtacttcacatattcatcttccgggcaacaatcgctcacaacaatatcaaagcgtttcaggtcacccatgcgcgccggacgcaccttgccaaatttactgtggtcgacaaccagcacatgcttttgcgccatcgacatggcccagtgttttaccggcaactcttcaagattaaagcaggtagcgcctttactgacatgcacgcccgcagcggaataaaaagcgatatccgggcaaaaattattcagcgtttgctgaaaatcgatgggtttgaaaatggcgttgctggcgtgaaattcaccaccgcaaagaaacgcgcggcaatggggtttctctttcagcgccagaaaggtatttagcgaataacaaacggcggtaaaagggatttcattatcaattgcttcaataatccacggcgtggtggtgccacagtcaaaaaagagggtctgatcgggttctaccagcgtcgcagccagttttgccgcccggcgtttttcttccaccaggcgggatttttgatcgcttaacaggtaatggctggcgctgcgtggttccagaacaatatagccgccgagcaaaacgacgggcgcactgtggttgttcagatcgcgacgaatcgtcatctccgaaaccccaagcagggcggcggcgtctttaagatgtaacttatcactgcgttttaattcttgcagcagctgcccgatacgctcttcgcgacgtgtttccataatccctctgaatagttattgaagcgagccgctcaatactacactttttagcagagatcagtcacgcacccagcctttgcggatcggtaatgcaaaacagaagcgataccacgattgcagacgttgatagagtttatgccccatcgcttgccagataatctgggcgctaaggcagccaatcatacctgccagcaatccaccgagcatatccagcggccagtggacgccaagataaacgcgcgaccaggcaatgacgacggccagcaccattaaaagtgagccggaccacaggcgatgccagcataaaaatgccagtgcaaaggtgaaaatcaccgtaccgtgatcgctcgggaatgagtcatccgccgcatgatgcaggaagttatagccgatattttcgacaaagggtcggtcgtgcggaaaaagatgtcccatcgtccaggacacaaacaggctgaccgccagcgcgatagcgatttttatcaccagttgccgttgtgctgtaagcccccacaaccaaagtactgcggccagcaacggcaccacggtaatcaaatctttagcaataaaaatcgccaacgagatcatccacggcgcagagtctggcgttgcgttaataagagagaatagagagagattcaaattttccagcataacttcccgacgcaaagtgattaaaagggagccaatacaggcaagtcgttgagaataaagtgcaggttaaactgggtaaagcggcatcgtcttatttccctcaagcggcctgtttacggtaggtgattgtaacgggcaaaggttaaataaaacttaaagaaagcgtagctatactcgcaataatgtaagaatgtgcttaaccgtggtttcagctacaaaattcgctttctcgttagctgcgcttttattaaactttgcgcgattattattggcgaagaaattgcatgcaaaataaattagcttccggtgccaggcttggacgtcaggcgttacttttccctctctgtctggtgctttacgaattttcaacctatatcggcaacgatatgattcaacccggtatgttggccgtggtggaacaatatcaggcgggcattgattgggttcctacttcgatgactgcgtatctggcgggcgggatgtttttacaatggctcctggggccgttgtcggatcgtattggccgccgtccggtgatgttggcgggagtggtgtggtttatcgtcacctgtctggcaatattactggcgcaaaacattgaacaattcaccctgttgcgcttcttgcagggcataagcctctgtttcattggcgctgtgggatacgccgcaattcaggaatccttcgaagaggccgtttgtatcaagatcaccgcgctaatggcgaacgtggcgctgattgctccactacttggtccgctggtgggcgcggcgtggatccatgtgctgccctgggaggggatgtttgtcttgtttgccgcattggcagcgatctcctttttcggtctgcaacgagctatgcctgaaaccgccacgcgtataggcgagaaactgtcgctgaaagaactcggtcgtgactataagctggtgctgaagaacggccgctttgtggcgggggcgctggcgctgggatttgttagcctgccgttgctggcgtggatcgcccagtcgccgattatcatcattaccggtgagcagttgagcagctatgaatatggcttgctgcaagtgcctattttcggggcgttaattgcgggtaacttgctgttagcgcgtctgacctcgcgccgcaccgtacgttcgctgattattatgggcggctggccgattatgattggtctgttggtcgctgctgcggcaacggttatctcatcgcacgcgtatttatggatgaccgccgggttaagtatttatgctttcggtattggtctggcgaatgcgggactggtgcgattaaccctgtttgccagcgatatgagtaaaggtacggtttctgcggcgatggggatgctgcaaatgctgatctttaccgtcggtattgaaatcagcaaacatgcctggctgaacgggggcaacggactgtttaatctcttcaaccttgtcaacggcattttgtggctgtcgctgatggttatctttttaaaagataaacagatgggaaattcgcacgaagggtaaaaaaatgcctgattgctttgtgcgatcaggcattctcgaattaatggtgatggtcgtcaatctggtgttcgataaccatcccttcacctacgctggcaagatggcgaacataaggatgcgggcggtaagccggagctggcgcaggagccgcatagacggtttgcggcacagtcgcgacgctgaccgcttgtggaacgctgactgaatcaggaaccacaaccactttgtatccactcggcacatagacggtgacactttgtgccatcgccacaccagtaaagcccattaaaagcgcgcccaacagtagacaatttttcataatcatttcgcctgaaataatgcagcgggttaatttccgcgaattatgcagccttcattcaggtattgtgttgccgggcgtgctgccttttttattgcttaaatggcgcttcgtgtttaagcactttatcgatcacatccagtacgccttcacggttattggagcctgcccggtattttgccgctgcgacgaccgcgctgccggcattttccattgcaaaactaaagcctgcctgacgcagcatctcaatatcgttaccaccatcgccaaagaccaccacttcgctgtcgtctattccccataatttctgcagttggcgaaggccattggctttatgtacaccggggataatcagatcgatgctgccgttgccggtatggaccggtaccatgatatcgccgatggcctcatgtaatgctttttgcacttgtgggatcagttcgtcagagagattaaggccaaatttaaagaagatatcttctaagttgtcaaagttatcgacgtattccagacggtgataatacatttccgccaccgttttcatggcatcgtcatattttttgagggtataggcgctattttttccgcaggcaataatttccacttccgggcgcgtcagcaaatgttccacgacagtagcaaacgcatccttcgacagctcgccattaaaaacatctttgccttcgctcactacccagccgccgttttcagccacaaaggctatttcattagcaatttcagggaagaaagagatcaactgataatattgattcccgctggcgaccacaaagcgaatgccttgtgctttcatttgctgatactgagccataaaccgctcacggttataggttttttgatcgcttaagaaagtaccatccatgtctaccgcaattaatttaatgctcatcaactattctccatcgccgtctgcgttttggtatcgggtttggcgacggctttcgcgacaatagccgcgagaataaccagcgccagtacaaccagcattgcactacgtaatccataatgttcgccgagatagcccagcagcggcggcccgacgaggaaagccagataaccggtcgtagctaccacgctgacgcgggttggtgcatcggggccggtatcgctggcggcagaaatggtcagcgggaagcccaacgaggcacccagtccccaaagtacaacagacaccccagcgacccaggcgctatcgacaaaaataatcagcccaatacccaacgcccccattagtgcactggcccgaaccacggcaacgcgactgtaatggtcaatgaaccaaccgccgataaagcgtccaacggtcatccccagggtaaaaccggcataaatcagcgagccggaagtagggctaaaaccgtgaccatcaaccattaataagggtaaccagtcgttggcagaaccttcggcaaaggccatcgccagcaccacaacaccaatcagcagcaactggatatcgcgataaaaaggtacgcctttttcaccatgctgggtgccatcggcagcatttttgcccgtaccgtcagggattgcctgaatggcgatataaataggcgcgatgcctaccagcgccgccaataaaatgtgcaccgttgccggaacgccaaaggccgtcagtgccatcccgacaccagcgcctgccagcgtgcccaggctataaaaaccgtgcatcatcggtaaaaccgtcttattcatttctctctcaacggcggcaccttcaacgtttatcgccacttccgcagaaccaaaactagccccaaagacgccgagaccaacggcaaagagcaagggcgatgtcagccagagtgccagacttagtatcatcatcccaatcaatgcgcaggacatcgtgacaaggatgacattacgcgtcccaaagcgtttcactaaccacgctgagcagagaataccgctcatcgaaccgatcgacagaccaaagagaacaccgcccatttcagcgatcgagacagagagaatatcgcggatagcaggcgtacgggttgcccaggacgccattaacaggcctggcaaaaagaagaacataaacagcgcccaggttcggcgtttcaatgcattacgtgaagaatttacggtcatagaccacgtcaaaataagaagagggaagacaacattagcaagactgtgtacatttgtacacaattgcagagagaggaaatgacatgcgtcgcgctaacgatccgcaacggcgagaaaaaattatccaggccacgctggaggcggtgaaactttacggaatacatgctgttacacaccgcaaaattgctgcccttgccggggtgccgttgggatcgatgacctactatttttcaggaattgatgagttgttgctggaggcgttcagccgttttactgagatcatgtcccggcaatatcaggcattttttagcgatgttagtgatgctccaggcgcatgccaggctatcaccgatatgatctacagctcacaggtcgcaacgccggataatatggagctgatgtaccagctctacgcgctggctagccgaaaaccgctcttaaaaacggtaatgcaaaactggatgcagcgcagtcaacaaacgctcgaacaatggtttgaacccggaaccgcccgcgcgcttgatgcgtttattgaggggatgacgctgcattttgtcaccgaccgtaagccgctatcacgcgaggagattttgaggatggttgagaggattgctgggtagtagataaatttcaggcaacaaaaaacccatttaataaatttcaggcaacaaaaaacccatcaaccttgaaccgaaatggcggggttgatgggctccacaaaatggggacatcaaagaaaagcagtggcactaattaagactgatgccctgcggaaaagttctgcggttgtgcaaaaaaatttcattttcagggcaacttcagttttatcctaatcctggccataccatgacgatgattgtccctgccagcgtcagcaggacgttggcgattgcataggtgcccgcatagcccagcgccgggatgttactgcgagctgtatcactgatgatctccattgccggcgcgcaggtgcgtgcgcccatcattgcgccgaacaacagtgcgcggttcattcgcaatacataagcaccgaacaagaaacagataaccactggcacaagactgacaatcaatccggcaatcaacatctgaccgccaatcgcgcccaggccgttattaataccgctaccggcgctcagaccaacgcctgccataaacaccataaatttcaggcaacaaaaaacccatcaaccttgaaccgaaatggcggggttgatgggctccacaaaatggggacatcaaagaaaagcagtggcactaattaagactgatgccctgcggaaaagttctgcggttgtgcaaaaaaatttcattttcagggcaacttcagttttatcctaatcctggccataccatgacgatgattgtccctgccagcgtcagcaggacgttggcgattgcataggtgcccgcatagcccagcgccgggatgttactgcgagctgtatcactgatgatctccattgccggcgcgcaggtgcgtgcgcccatcattgcgccgaacaacagtgcgcggttcattcgcaatacataagcaccgaacaagaaacagataaccactggcacaagactgacaatcaatccggcaatcaacatctgaccgccaatcgcgcccaggccgttattaataccgctaccggcgctcagaccaacgcctgccataaacaccatataaatttcaggcaacaaaaaacccatcaaccttgaaccgaaatggcggggttgatgggctccacaaaatggggacatcaaagaaaagcagtggcactaattaagactgatgccctgcggaaaagttctgcggttgtgcaaaaaaatttcattttcagggcaacttcagttttatcctaatcctggccataccatgacgatgattgtccctgccagcgtcagcaggacgttggcgattgcataggtgcccgcatagcccagcgccgggatgttactgcgagctgtatcactgatgatctccattgccggcgcgcaggtgcgtgcgcccatcattgcgccgaacaacagtgcgcggttcattcgcaatacataagcaccgaacaagaaacagataaccactggcacaagactgacaatcaatccggcaatcaacatctgaccgccaatcgcgcccaggccgttattaataccgctaccggcgctcagaccaacgcctgccataaacaccattaagccgaactctttcaccatgcttaatgcaccctgcggaatgtaaccgaaggtcgggtggttagcgcgcataaatcccagcataattccggcgaataacaacccggcagcgttccccatgccgaaactgaatgtgctgaactggaaggtgatcatcccgatcatcagcccaataacaaagaaggcgcagaatgccagcaagtcagtgacctggctgtgaatcgagataaagccgatgcgatcggcgatggtttttacgcgacgggcatcgccgctgacttgtaaaacgtcacctttgttaagcacgacgttgtcatctatcggcatctcaatctggctacgaatgacgcggttaaggaagcaaccgtgatcggtcaacttcagttgtgcgagacgtttgcccacggcgttatggtttttaacgaccacttcttcagtgacgatacgcatgtcgagaaggtcacgatcgaaaacttctttgccgttacggaagctgggatcgagtcgtgcgtgggcgtcgggatagcctaccaacgctatttcatctcccatttgtagcacagcatcaccgtctggattcgccagaatcccgttacgtcgaatacgttcaatgtagcagccagtttgtcgataaatacccagttcacgcagatttttgccgtcggtccaggccaccagctccgggccgacgcggtaggcgcggatcaccggtaaataaaccttacggttggcatcagtgtccaggccacgttcgcgggcgatttgctgggcgctggtctgtaagtcctgatgctgcaatttcggcaagtaacgcgcaccaacaatcaaactcaccagaccgattaaataggttaaggcatacccgaggctcagattatccagtgccagtgagagctgcctgctttccatgccggaatgacgcagtgtatcgccagcaccgaccagaaccggtgtcgacgtcatagagccagctaacataccggccgtcaggccaatatcccagccaaacagcttacctaaccctaaggcgatcaccagcgcactgccaaccatcaccagtgctaacattaggtaatttttcccatcgcgaaaaaaaatggaaaaaaagttcggtccggcttcgaccccgacgcagaaaataaacagcataaagccaagattaagcgcgtcggtgttaatgctgaaatgttgttggcctaataacagcgatacgactaaaacgccaatggaattacccagttggatcgaaccaagtcgtaatttcccgagacatagcccaagcgcgaggaccacaaataataacagaatgtaattcccatttaacaattcggcgacgtttatattcacggaggctaacttcttgtttactagtaagctgttgaaagaaatggtaatttacgataatgttttttaccagaattcagggcgcagattcattcagcgcacctaaacgatagtaaagtaacaatatattttactagtgtaatcacattaggtatcaacggctatatgaattgcgttggcctatattagcatggaatgcgaagcggctttatcttactgaacgccacactggcgaaaaatgtgttcgatagacgcagtgtcaggaggaacgagtgaaacataaacaacgttgggcgggggcaatctgctgttttgtcctcttcattgtggtgtgtctttttctggcgacgcacatgaaaggcgcttttcgggctgccgggcatcctgaaatcggtttgctatttttcattcttcctggtgcagttgccagcttcttttcacatcgtagagaagtcctgaaacctctgtttggcgcaatgctggcggcaccctgttcgatgctcattatgcggctgtttttttcaccgacgcgctcattctggcaagagctggcatggttattaagtgcggtgttctggtgtgcgctgggggcattgtgtttcttatttatcagtagtttgtttaaaccacagcacagaaaaaatcaataaagccctcaacgcgagggcttgtcagacgatcaggcgtccagattctctttcacccatgcagcaaaatcggtatagccgccgatatgttgctgatcgacaaaaatctgcggcacggtttctacgggtttacctgccttttgttgtagatcttctttagtgatcccttccgcacgaatatctacatactgatactggaaatcatcgcgctcattgctcaatttctcggccagatctttggcacgcacacagtaagggcaacccggacgaccaaaaataacggtttgcattatttctctcctcatagatttatgcctgtaatgatcacgctaaaatgtattcgctgaaagtaggtttaacctgttgcattaattgctaaaagctataactgttaaacacaatgcagtgaaaagttttagactgaaggctcactttgcagagggaagcgtatgcgcgcgatcggtaaattgcctaaaagcgtgttgatactggaatttatcggaatgatgttgctggcggtggcgctgctgtcggtaagcgactccctgtcgctacctgagccattttctcggccagaagtgcagattctgatgatttttctcggtgttttgctcatgattcccgctgcggtggtggttattcttcaggtggcaaaacgtcttgccccacagctgatgaaccatccaccgcaatattcacgttcagaaagagaaaaagataatgacgccaaccattgaacttatttgtggccatcgctccattcgccatttcactgatgaacccatttccgaagcgcagcgtgaggcgattattaacagcgcccgtgcgacgtccagttccagttttttgcagtgcagtagcattattcgcattaccgacaaagcgttacgtgaagaactggtaacgctgaccggcgggcaaaaacacgtagcgcaagcggcggagttttgggtgttctgtgccgactttaaccgccatttacagatctgtccggatgctcagctcggcctggcggaacaactgttgctcggtgtcgttgatacggcaatgatggcgcagaatgcattaaccgcagcggaatcgctgggattgggcggggtatatatcggcggcctgcgcaataatattgaagcggtgacggaactgctgaaattaccgcagcatgttctgccgctgtttgggctgtgccttggctggcctgcggataatccggatcttaagccgcgtttaccggcctccattttggtgcatgaaaacagctatcaaccgctggataaagacgtactggcgcagtatgacgagcaactggcggaatattacctcacccgtggcagcaataatcgccgggatacctggagcgatcatatccgccgaacaatcattaaagaaagccgcccatttattctggattatttgcacaaacagggttgggcgacgcgctaaaactgccacgtcgatgtatgatacgcgggcttttgaccaggtctgacagagaggtgcagggtgaaaattgccatattgtcccgggatggaacgctctattcgtgtaagcggctgcgtgaagccgctatacagcgcggtcacctggttgaaattcttgatccgctttcttgctacatgaacataaatcctgcggcgtcttctattcactacaaaggccgcaagttaccccattttgacgcagtgatcccgcgtattggcaccgccattaccttttatgggacggcggcactgcgccagttcgagatgctggggagctatccgctcaatgagtcggtcgccattgcccgggcgcgtgacaaattgcgttccatgcaactgctggcgcgtcagggcatcgacctgcctgtcacgggcattgcgcattcgccggatgataccagcgatttaatcgacatggtcggtggtgcgccgctggtggtcaagctggttgaaggcacgcagggaattggcgtcgtgctggcggagacgcgtcaggcggcggaaagcgtgattgacgctttccgcggtctgaacgcgcatattctggtgcaggaatatatcaaagaggcgcaagggtgcgatatccgctgtctggttgttggcgatgaagtagtcgctgcgattgaacggcgggcgaaagagggcgattttcgttccaatttgcatcgtggcggcgcggcaagcgtcgccagtatcacaccacaggagcgtgaaatcgcgataaaagccgcgcgaacgatggcgctggacgttgctggtgtggatattctgcgtgctaatcgcgggccgttggtgatggaagtgaatgcgtcgccagggctggaaggaatagaaaaaaccaccggtatcgacatcgcgagtaaaatgatccgctggatcgaacgccacgctacgacagaatattgcctgaaaacgggtggttagtcgcaatcacattactgatcatggttttgcctgcgctttttgcgtaagctgtgccggtctttttatcggaagaggttgtacaaaattatgacatcgctggtcgttcctggtctggatacgttgcgtcaatggctcgatgacctggggatgagtttttttgaatgtgataactgtcaggctctgcatctgccccatatgcagaatttcgacggtgtctttgatgctaaaatcgatctgatcgataacacgatcctgttttctgccatggcggaagtccgaccttcagccgtattgccgctggcggcggatttatcagccatcaatgccagttcgctgaccgtgaaagcatttcttgatatgcaggatgataatctgccaaagctggtggtttgccagtctttatccgttatgcagggcgtaacctatgagcagtttgcatggttcgtgcgtcagagcgaagagcagatttcgatggtcattcttgaagctaatgcccatcaactgctgttaccgactgacgatgaagggcaaaataacgttaccgaaaactatttcctccactgataactcctttcgagcacgcagtcgctgccgcagtgactgcgtgccgcaaaattatccgctgtttttaaccttttattaaagattaattcacttctcttgtgccgatttggctttatcacatagagcaaatacgcataaaatttgttaaataccgttttttaatccgagctatagtctcaaaccctggctaaagttattcttgcgatgcttttatatagtgagcagtgcaggccgggagagagttctcttttcttacaccgcgccgataaaaatatgcacgtttattgcatatctttcagtgtgacaacttttgttcgtttgttaacgaattttcagaaggaaagagatatgaccgccttaaataaaaaatggctatcgggtctggttgcgggggctctgatggctgtctctgtcagcacgctcgcggctgaacaaaaaacactccacatttatagctggtctgattatatcgccccggacaccgtggccaactttgaaaaagaaaccggtattaaagtcgtctacgatgttttcgattctaacgaagtactggaaggcaaattaatggcggggagcaccggctttgatctggtggtgccgtcagcaagctttcttgagcgccagctgacagcgggagttttccagccgctggataaaagcaaattgccggagtggaagaatctcgatccggagctgctgaagttggtcgccaaacacgatcccgacaataaatttgctatgccctatatgtgggcgacgaccgggattggctataacgtcgataaagttaaagcggtgctgggcgaaaacgcgcccgtcgatagctgggacttgatcctcaaacctgaaaatctggaaaaactgaaaagctgcggtgtctctttcctcgatgcgccagaagaagtgtttgctaccgtgctgaattatctcggcaaagatcctaacagcactaaagcggatgattacaccggaccggctaccgatctgctgttaaagctgcgcccgaacattcgttatttccattcatcccaatacatcaatgatctggcgaatggtgacatctgtgtcgctattggctgggcgggcgatgtctggcaggcgtcaaaccgcgcgaaggaagcgaagaatggcgtgaatgtctcgttctcgattccaaaagaaggggcgatggcgttctttgatgtattcgccatgcctgcggatgccaaaaacaaagacgaagcctatcagttcctgaattacctgctgcgtcctgatgtggtggcacatatctctgaccatgtgttctatgctaacgccaataaagcagccacgccgctggtgagtgcggaagtccgtgataacccgggtatttatccgcctgcggatgttcgtgcgaagctgttcactctgaaagtgcaggacccgaaaatcgaccgtgtgcgcacccgcgcgtggaccaaagtgaagagcggaaaataatccgcagccgtagatgccggacgggcgcaccacacccgccggcaattcgcaccatcatggtgcgcttgcacacattcaatgccggagagcagccgtgaatgacgctatccctcgcccgcaggcgaaaacccgtaaggcgctgacgccgctattagaaatccgtaacctgaccaaatcctacgatggtcaacatgcggtggatgatgtcagcctgaccatctacaaaggtgaaatcttcgcgctgctgggcgcatccggctgtggcaagtccacgctgctgcgtgtgctggcaggttttgaacaaccttcggccgggcagattatgctcgatggcgtcgatttgtcacaggtgccgccttacctgcggcccatcaatatgatgtttcagtcttacgcgctgtttccgcatatgaccgtggaacagaacatcgcttttggcctgaaacaggacaaactaccgaaagcggaaattgccagccgggtcaatgagatgcttgggctggtgcatatgcaggagttcgccaaacgcaaaccgcatcagctttccggtggtcagcgtcagcgtgtggccctggccagaagccttgctaagcgcccgaaactattactgctcgatgagccgatgggcgcgctggataaaaagctgcgtgaccggatgcagcttgaagtggtggatattctggagcgcgtcggtgtgacctgcgtaatggttactcacgatcaggaagaggcgatgaccatggcggggcgtatcgccattatgaatcgtgggaaatttgtccagattggcgagccggaagagatctacgagcatccgaccactcgctacagcgctgaatttatcggttcggttaatgtctttgaaggtgtactcaaagagcgtcaggaagatggtctggtactttattcgccgggactggtgcatccactgaaagtcgatgtggatgcttcggttgtcgataacgtgccggtgcatgtggcgcttcgcccggaaaaaatcatgctttgcgaggaaccgcccgccaatggttgtaacttcgcggtgggggaggtgatacacattgcctatctcggcgatctttcggtgtatcacgttcgtctgaaaagtgggcagatgattagcgcccagctacaaaacgcccatcgtcatcgtaaagggttaccgacctggggcgacgaagtgcgtttgtgctgggaagtggacagctgtgtggtgctgacggtttaaggagcaaatatgagtacacttgaacctgctgcccagccaaaaccctttaagctgtggttgtcgcagctgcaaatgaaacatgggcgcaaactggttattgcgttgccatatatctggttgatcttgctgtttctgctgccatttctgatcgtctttaaaataagcctggcggagatggcgcgcgctattccaccttataccgaattgatggagtgggctgacgggcaactttctatcactcttaatctcggtaattttctgcaactgaccgacgatccgctctattttgatgcttatctccagtcgttacaggtggcggcgatttcgactatttgctgtttactgatcggctatccgctggcgtgggcggtggcgcacagtaagccttcgacccgtaatatcttattactactggtgatcctgccgtcgtggacctcgtttctgattcgtgtctacgcctggatgggaatattaaaaaacaacggtgtgctgaataattttctgctgtggctgggggttatcgatcaaccgctgaccattctgcataccaactttgcggtttatattggcattgtttacgcctacgtgccgtttatggtgctgccgatttacaccgcgttgattcgtattgattattcgctggtggaagcggcactggatctcggtgcacgaccgctgaaaacgttctttactgtgatcgtgccgctgactaaaggtgggattattgccggatcgatgctggtgtttatcccggctgtgggcgagtttgtgatcccggaactgctcggtggcccggacagcatcatgatcgggcgcgtgctgtggcaggagttctttaacaaccgcgactggccggtggcctcagcggtagcgatcatcatgttgctgctgctaattatgccgataatgtggttccacaaacatcagcaaaaaagcgtgggagaacacggatgaataatttaccggtggttcgttcgccctggcggattgtgattttgctgttgggcttcacctttctctacgcgccaatgctgatgcttgttatctattcgtttaacagctcgaagctagtgacggtgtgggccggctggtcaacgcgctggtatggcgaattattgcgcgatgacgcgatgatgagtgcggttggtttaagtctgacaattgcggcctgtgcggcgacggcggcggcgatcctcgggactattgcggcggtcgtgctggtgcgctttggcaggtttcgcggatcaaatggttttgccttcatgatcaccgcaccgctggtaatgccagatgtcatcacgggtttgtcgctgttgttgttattcgtcgcgcttgctcatgctattggctggcctgcggaccgcggtatgctcaccatctggctggcgcatgtcactttctgtacggcttatgtggcagtcgttatttcgtcgcgtctgcgggaactggatcgctcgatagaagaagccgcgatggatctcggtgcgacgccgctgaaagtgttttttgtcattacgctaccgatgatcatgcccgcgatcatttctggctggttactggcttttactttgtcgcttgatgatctggtgatcgccagctttgtttccgggccgggagccaccactttaccgatgctggtcttttccagcgtgcggatgggggtgaatccggaaatcaacgccctggcaacattgatcctcggcgcggtcggaattgtcggatttatcgcctggtatctgatggcgcgcgcagaaaaacagcggatacgcgacatccagcgtgcaagacgtggctgaagacactaaaatttgccaacctggctacataatgccgcgcatgtcgcggcattgttttcatggaagacgaaacgttgggattttttaagaaaacatcttcatctcatgctcgcctgaatgtgcctgcgctggtgcaggtggcggcgctcgccattattatgatccgtggcctcgacgtgctgatgattttcaatacgctgggcgtgcgcggtattggcgagttcattcatcgcagcgtacaaacctggagtttaacgctggtctttttgagcagtctggtgctggttttcattgagatctggtgtgcgttttcactggtgaaagggcgtcgctgggcgcgctggctgtatctgttgacacaaatcacagccgcaagttacttgtgggcggcttcgctggggtatggttatccggaactgttcagcattcccggtgaatcaaaacgtgaaatcttccatagcctgatgctgcagaagctgccggatatgctcatcctgatgctgctgttcgttccctcgacaagtcggcggttcttccagttgcaataatgtgtataatcgtcgcccctgatgatgtgaaggtcaatgtatgcagtgcgcactttacgacgcgggtcgctgtcgttcctgtcagtggataacgcagccgattccagagcaactctccgctaaaaccgccgatcttaaaaatctgctcgctgattttccggttgaggaatggtgtgcgccggtgtcaggcccggaacaagggtttcgtaataaagccaaaatggtggtgagtggtagcgttgaaaaaccactgctcggtatgctgcatcgagatggtacaccggaagacctttgtgactgcccgctttatccagcctcatttgcgcccgtttttgcggcgctaaaaccgtttatcgcccgtgcggggttaacgccctacaacgtggcgcgtaaacgtggtgaactgaaatacattctgctgactgaaagccagagcgatggcggcatgatgctgcgttttgtactgcgttctgataccaaactggcgcaactgcgtaaggcgctgccgtggttacaggaacaattaccgcagctgaaagttattaccgtcaatattcagccggtacatatggcgattatggaaggggagacggagatctacctgaccgaacaacaggcactggcagagcgttttaatgacgtaccgctgtggatccgtccgcaaagtttcttccagactaatccggcggtcgccagccagctgtacgccaccgcgcgcgactgggtacgacagctgccggttaaacatatgtgggatctgttctgcggtgtgggtggctttggtttacactgcgcgacgcctgacatgcagttaaccgggatcgaaattgcaccagaggccattgcctgtgcgaagcagtcagccgctgaactgggcttaacgcgtttgcaatttcaggcgctggactctacgcagtttgccaccgctcagggggaagtgccggagctggtgctggttaacccgccgcgccgcggcatcggtaaaccgctgtgtgattatctctcaacgatggcaccgcgttttattatctactccagctgtaacgcccaaactatggcgaaagatatccgcgaactgcctggttatcgcatcgaacgggtacagctttttgatatgttcccgcacaccgcgcactatgaagtgctgacgctgctggtgcagcaataaaaaagccgcaggtgcggctttctgaatcttactgtgggaaccactggtcattgattttctgatatgtaccgtcagctttaattgctgccagcgcgttattcagtttttccagcagagctttgttatccggacgtacagcgatacccaggccggtgccgaagtattgcggatcggtcactttttcagtagcaacgcccagttgcggattggttttcagccattcgtttaccactgcggtgtcaccaaatacgccatcaatacggccatttttcagatctataaaggcattctgataactgtcataggagacagtttttacttccgggtgctgatcctgaatatatttctggtgcgtggtgccgttttccatcccaatacgtttgcctttcagatcggcaaacgttttgtaggtatcttttttggcaatcacgacggctgagttttcgtagtagggcgtggtaaacgatacctgtttgctacgctccggcgtgatatccattccggagattacggcgtcatattttctgaatttcagtgacgggatcaggctgtcgaacgcgtgattagtaaaagtacattctgcctgcatttgtttgcacaaggcttttgccagatcgatatcaaagccgacaatctcattattagcacctatagattcaaagggtggataggtggctgaaacgccaaaattgattttctctgcggcagaagcaccgaaagtaaaggaagcaagtaaagcggcaagaactaactttttcatgatggaactcccgtctgtcaatcttatgatttttggccgtgtctgcggcatgggataacaatgccatcaagtgaatttatatgcaataaatatgagtaaataatttgtatgaaataaaaaaagacggacaacttagtgggttggccgtcttcattataagaatttatgcactgtgcaggtcgggtaaggcgtccacgccgcatccggcatcagcatgcagctacattaattccgccgttcgaatgccagtgctttacgctcgatcagacgcatcatcagcgtcagcaggccgttgacgaccaggtaaataatccccgccgcgccaaataccattacatcgtaggtgcgtccgtacaataactggctgtatcccatcacttccatgagcgtaatggtgtaagccagagaggtacttttgaacaccagcaccacttcgttggaataagaagagagcgagcgtttaaacgcgtacggcagcaggatcgccagcgtatcttttttgctcattcccagggcgctacaggactgccattgaccttccgggatcgcgcgaatcgcaccgtaaaacagctgcgtggtgtacgccgcactgttcagcgacaacgcaatcagcgcacataaccacggttctgacaacaaatgccacagtgccggatactcctgcaacgttgggaactggcccggtccgtaataaatcaggaagatctgcaccagcagcggcgtaccggtaaacagcgtgatatagccccgcaccagccacaccagcaccggcgttttcagcgtcaggatgatggtaaaaatcaatgccagaatcagtgccacaatcagcgaggcaacggttagcgtcaggctggtgtgcaaccctttcatcagttcgggtaaatactcaaacattagctgggcctccgctcaaaacgtgtcgcgcgcaggtcaatgcgtttgagaatgtactgactgagcagggtgatcaccaggtaaatcgccgccgccacaatgtaccaggtaaacggttcttgggtacgggtagcgatgcttttggtttgtagcattaaatcattcacactaatcaaactgaccagcgcggtatctttcagcagcaccagccactggttaccgagacccggcagcgcatgacgccacatctgcggcatcaccagacggaaaaagatagccgatttcgacagccccagcgcctgaccggattcccactgacccaccggcaccgcttttaatgcaccacgcagcgtttgcgaggcataggcggcatacagcagtgacagtgcgatgacaccacaaaggaacgggctaacgtcgaagttctcaatgtccatctgcaccgggatctgcacgaacccaagattgatagtgaagccatccgaaagcgtcagcagcagctgcgaggagccaaaatagataaacagcaccaccagaatttctggcaggccacgcagaatggttaccagcgctgaacctgcccacgcgacaggacgccatttcgcagactcccataccgcaaagaacatcgccagcgccagcccgacaatcaatgcacaaacggcaaggccgacggtcatcccggcggcgcttgctaaaggaaaaaattcattcatcaggaattacttctggaaccatttgttgtagatggtttcgtaagtgccatctttcttcactttttccagcgcagtgttgagtttctgctgcagttcagtgttgccctggcgtactgcgatgccgaggccagtaccgaagtaatctttatcggtcactttatcgcccactgccgccagtttcgggttatctttcagccattcggttaccactgcggtgtcaccaaatacgctgtcgatacgaccgttttgcagatccagttttgcgttctggtaactgtcatatggcacggtagtgatttccggatgcttatccataatgaacttctggtgtgtcgtcccgttctgaacgccgacttttttgcctttcagctgatcaacactggtgtatttgccttgctgacccacaaacagggcagagttgtcatagtacggggtggtaaacagcacctgcttttcacgctccggagtgatatccatgcccgccatcactgcttctacgcgacggaatttcaggcttgggatcaggctgtcaaacgcctggttagagaaagtgcaggttgcatcaatctctttacacaatgcctgcgccaggtcgacatcaaaaccaacgatctggttgtttgcatcaatcgattcaaacggaggataggaggcttcggtggcaaaacgaatggtttcggctgctgtggcggaaagactaaaacctgcaattaacgcggcaatcagaacttttttcattgttgttatcccgaatcttagtgagagagatagtttttaaatgcttcggtttgcggctcggtaaagcagctcgcgtcgccttgttctacgatatgaccgttttccatatacaccactcggctggcggttttacgcgccacttcaacttcgtgggtgacgatcacctgggtaatattcgtttctgccagctcacgaatgatgctgacgatttgtgccgtaatttcggggtccagtgcggcggtcggttcatcgaacagcagtacctgcggttccatcatcaacgcacgggcaatagcaacacgctgctgctgaccaccagaaagatgcagcgggtaacgatcgctataaggtttgagacgcagacgttccagcagtttttctgcacgggccagcgcctgatctttactcaaccccagtacacgacagggcgcttcaatcaggttttgctgcacggtcagatgcggccacaggttgtattgctgaaacaccatgccaacgttacgacgcaaatcgcgaatcgctttgtcagagggggttttggtgaaatcgaaatggttgcctgcaatgttgagcgtaccggagcgcggcatctcaagcagattgagtacacgcagcagcgagcttttacccgcgccgctggggccaagtaacaccagcgtttcgccctgtgggcaatccagcgtgatatcgaacagcgcctgatgcgcgccgtagaagcaattaatgccgtttaattgaatactcattgacactcgtatactggcagtctgatagctattgaggtcgaagatagtacctttgacagaataattatgcaatatttctgctttaaaagttaaaagcaaagcgcattattcaataaacatagcacaaaataacgggggcggtggtcggcgagcataaatgtcggcattcctcacgaaatgccggacaatttacggggtttattggttgatcaagacgttagcgattctcgatggactgacggagcgtacccgccgtggcatgaacgctaccgcctaagtagcgcacatcgtcgatgacccaacactggccttcctgaatcattaacacttcatcctgccagccctggtcaccctgcttgagatccacgcgcaatggaatgttacgggcatcacgattagggatagtagatgcactggcaacgtgggcgctgtctggcaaggtggttcgactggagaacggatcgctgcttaacaattcacgatgactattatcgcggctggcatcgctaagtagggttgccagtttgtcactcaaataggggcgcagagcggtaatgtcattgccgcgatgttgaatgcggtagtcatagaactgttgagccacgctatcaggccccccctggacacaggaaccggtgcgggggccgttatctttataagctggcgtgacggtggtacaggcactgagtagcagtgcgcaagggataagcatggtcaatttgctatagcgcatgatgatttccttataagcgaacaccttgaaagcgttctacgataataatgatatcctttcaataatagcgtatcagtccgataatgctttgaagatcgaaggcttagcaaacaaggagatcgatcatgcaattttctacaaccccaactctggaaggccagaccatcgttgaatattgcggtgtggtgactggcgaagcgattttaggcgcgaatattttccgtgatttctttgccggtatccgcgatatcgttggcggacgctccggtgcctacgaaaaagaactgcgtaaagcgcgggagattgcctttgaggagctcggctcccaggcgcgagcgctgggggctgatgccgtcgtcggtattgatatcgactacgaaacggtcgggcaaaacggcagtatgctgatggttagcgtcagcggtacggcggtgaaaacgcgtcgatgagaagagtcttctggctggtcgctgccgctctgttactggcagggtgcacaggcgaaaaaggcattgtcgagaaagagggatatcagcttgatacccgacgccaggcgcaggcggcgtatccgcgcattaaagtgctggtgatccactacaccgcagatgattttgatagctcgctggcgacactgaccgataagcaggtcagctcgcattatctggtccctgcggtgccaccgcgatacaacggtaaaccgcgcatctggcaactggtgccggaacaagaactggcctggcatgcggggattagcgcctggcgcggggcaacgcgccttaacgacacctctattggcattgagctggaaaaccgtggctggcaaaaatcggcgggagtgaaatattttgccccgtttgaaccggcacagattcaggcgcttattccgctggcgaaagatattattgcccgttatcacatcaagccggaaaacgtagtagcacatgcggatattgcgccgcagcgcaaagacgatccggggccattattcccctggcagcaactggcacagcaggggattggtgcatggccggatgcgcagcgggtgaacttttaccttgccgggcgcgcgccgcacacaccggtagagaccgcgtcattgctggagcttttggcgcgttatggttatgacgtaaagcctgatatgactccgcgcgagcagcggcgcgtgattatggcgttccagatgcatttccgcccgacgttatataacggcgaagcggatgcagaaactcaggcgattgccgaagcgttgctggagaaatacgggcaggattagcgcggcagttttccgtggtcgcgtagccaggcggcagttttctcgataccttcatccagggtgaggactggttgataacctaactcttcctgcgcacgcgtaatatccagcgtaaagtcaaaattcaacttggagacgccgtagtgggtcagcggcggctcttttgctgacttgcggcctaaacgctccatgctgcgggcgatcatatccagcatcgggtaagggacggaacgaatacgacagtcaatattcaattcgtctatcagcttctgcacgatgctgcgcagtgtgcgatgctcgccgttggtgatgttgtacacacgcccggaaggtagcttatcgcaggcttcctggcttgccagccacatggcgtgcacggcattttcatagtaggtcatatcgaccagcgcactgccgccatgcggtaacagaatactgccgtagtgatgcatcatatgcgccagacgagggataaagactttatcgtgcggtccgaacagactttgtgggcgcagaatagtaaagcgcgtttgtggattcgcctgcgaaagcatattgatcacttcttcactagctgctttgctgcgggcaaactcgttggcgaagcggtgagggcgaaaatcttctttaatatcgcgatggtggtgataatcgaagtacagggagggagaagagatatgaataaagttacgcacaccccaggcgacagcccattcacccaggcggcgagtggcacgaacgttagccagatcgaaagcctgttgtgtcccccagggcgaggtaaagctggagcagtgccacagcgtatcaatgcctgcgagcatcactttagcttgtgatgagaccagctcggtcagatccgccggaacaaactctgcgcccattttttccagcaatttacccattgcctcgttgcgaccggtcgctcgcacgctgatgcctttctggcataaaaactctaccgcgtttcgacctaagccgctggtggcgccggtaaccagtaccttcatatcaatccactgttgttgagaaaataacgtgcgcattcttccgtgatttcctccatgatgcaatgggaaacatgaaagaataacgcaggttttgtcgattaatctgtgctttgttctgccagtctggcgattcgttttgccattccgcgaaaaataaacagatgcgcggggatcatcaataaccagtaaaacaaccctggcataccgtgcggatgccagaatgcgcgaacatcgatagtacgatagtcacctttatcttccagggtaaaacacagtcgtcccagccccggcgctttcatgccaaataacagcgtaagttgtttttgcggttcaacgacaatcactttccagctatccaccgcatctccggtctgcaaatattcacgctccgggcggcctttcgccagcttatgaccgatcgcgcggtccatcaacgcccgggtttgccacaaaatattgccaaagaaataacgctctttaccgccgatttgattcaccacctgccataaagccgcaaggctggcggacgttttaacggtaaaccccgcctgtttggcgaaataaccgtactccggtcgccagcgggcaaaggcctgagcgtcgtagccccagtcgctggagttgaccagcttttcttcctctttcaacgtgctacgtaccgcgtcatcgaaagcgatcagccgttgtgggatgagcgcacgtagcgcggtgtcatccgccagcagatcgtgtttcagcccctgaatcaacgccctggcggtggtgggcggtactgaagtaatcacattaagaaaccacaccgaaatccagcgggtggggagggggatggggagcaaccagcggcgcttaccgctcaccgccataaaatgttcaaactgttgctgataactgagcacttctggtccggcggcttcgaagatgcggtgttcgcaggccggatgatctaacagcgccaccagatagtgcagcaagttttccagcgcgatgggcgttgtgcgtgaacggacccagcgtggcggcgttaacactggcaggttgtagaccatatcgcgcatgacttcgaacgccgctgaacctgcaccaacgattattccggcacgcaattcggtcaccgggacacccgcttcacgaagaatatccgccgtagcctgacgggcgcgcagatggtccgactgctcatgtggcggggcctgcaacgaactgagaaagattaattgctttaccggtacttcgcgcagcgcatcgcggacgttgagagccacctggcgctcctgagcgataaaatcaccgccttctcccatgctgtgcaccagaaaatagaccgtatcgatatcctgcaacagggccggaaggttatccggccagctgagatcgactttatggcaactgacatttgccagttgcagctttgcaagcctgtcgacatgacgtgccgccgccaggatctgatgcccctgctggctgagtgttcgcaccagatgctgaccaatgtagccactggcaccgagaactaaaatgcgttgcggcacgtctccctccttaacgcgccaggaatgcgcgccagtgggcggcgacttccgccagctgagcgcgcgagacgtcaagatgcgtcaccaggcggacaatcggcgaggcgttaatcagtacgtttctcgctttcatgtattcgcctaacgcggcagcattttcttccccgacgcgaacaaacagcatattggtgtcctgacgcatcacatccgcgcctgcttcacgcagttgcttcgccatccaggcggcgttgtcgtggtcttcctgcaaacgtgcgacgttatttttcagcgcatacagcccggcggcagccagaatgccggactggcgcatcccgccacctgtcattttccgccagcgaatggcacgtttaatgtaatcacgattaccgacgagtaatgaaccgactggcgtcccaagacctttcgacaggcaaatggtgaacgagtcacaatattgtgtgatctctttcagttcgcagccgtaagccaccacggcattaaagatgcgcgcaccgtcaacatgcagcgccagattgcgcttgcgggtaaattcccatacctcttttaagtattcacgcggcagcactttgccgttgtgggtgttttccagactgagtaatttggtgcgggcgaaatggatatcgtcgggtttgattttcatcgccactttatccagcggtagcgtgccgtcggcagctgcgtcgatgggttgcggctgaatactgcccagcactgctgcgccaccggcttcaaacagatagttatgcgcggcctgaccgacgatatactcttcgccgcgttcgcagtgactgagcagagcgaccaggttggcctgagtgccggtaggcagaaaaatggcggcttctttaccggaaagctcggctgcatagtcctgcagagcattaacggtagggtcgtctccgtaaacgtcgtccccaaccggggcggccatcatcgcttcgagcatggcgcggctcggtcgggtaacggtatcactgcgtaaatcaatcatggcatgtccttattatgacgggaaatgccaccctttttaccttagccagttcgttttcgccagttcgatcacttcatcaccgcgcccgctgatgattgcgcgcagcatatacaggctgaaacctttggcctgttcaagtttgatctgcggtggaatggctaattcttctttggcgaccaccacatccaccaacaccggaccgtcgatggagaaggcgcgttgcagagcttcatcgatttcagacgctttttctacacgaatacccgtaatgccgcaggcttcggcaattcgggcaaagttggtgtcgtgcagctcagtaccgtctgtcaggtagcctccggctttcatctccatcgccacaaagcccagcacgctgttattaaagacgataattttcactggcaatttcatctgcattactgagaggaaatcgcccatcaacatactgaaaccgccatcgccgcacatggcgaccacctgacgttccggctcggttgcctgcgcacccagcgcctgcggcatggcgttagccatcgaaccgtggttaaacgaacctaacagacgacgcttgccgttcattttcagataacgtgccgcccacaccgttggcgtaccaacgtcacaggtaaagatggcgtcatcggcggcaaaatgactaatttgctgcgccagatattgcgggtgaatggctttctcgctcggtttagctaaatcatccagccctttgcgggcgtcgcggtaatcttccagcgctttatccagaaacttgcgatcggttttttcttccaccagtggcagcaatgcccgcagggttgatttgatatcgccgaccagcgccatatctaccttgctatgcgcgccgatgctggctgggttgatatcaatctgaataattttggcatcggtcgggtagaacgcgcggtagggaaattgcgtgccgagcagcactaacgtatcggcattcatcatggtatggaaacctgacgagaagccgattaatcccgtcattccgacatcatacggattatcgtattcgacatgctctttaccgcgcagggcatgaactataggcgctttaattttcccggcaaactcaactaactctttatgcgcccccgcacagccgctgccacacatcagggcgatattgctggaataacgcagcagttgcgccagtttgcgtaactcttcttcttccggtgttactaccggctgtggcgcatgataccagtgggtagttgccccttctggcgcaggttttaacgccacgtcgcccggtaacacaacaacggaaacgccacggttaagcaccgctttgcgcatagcaattgccagcacttgtgggatctgctctgggctggaaacaagctcgcaatagtgactacattcgcggaatagctcttgtgggtgggtttcctggaaatagccgctgccaatttcgctggagggaatatgagcggcaatcgccagtaccggaacgtgattgcggtggcaatcgaacaggccgttgattaagtgcaggttgccgggaccgcacgatccggcacagaccgccagttctccgctaagttgtgcttcagcgccagcggcaaacgccgccacttcttcatgccgggtggacatccactcgatggtgcccatgcgattaagactgtcactaagaccgttcagagagtcgcccgtgactccccagatgcgtttcacgcctgccgattcgagtgttttggcgatataagctgcaaccgtttgtttcatggttctccatctcctgaatgtgatgacggtaacaagtttagttcatctgacggagggggaagggatgggagaaaaaggaggcactaacggttaaatagcccgatgaaaggaatatcatcgggcatcaggcgattatgcgagaaccaaatccccctgcggatggcaggagcaggccagtacgtaaccttcagcgatttcggcgtcggtcagcgtcattgtgctgctcaccgtatattcaccggaaatcactttcgtcttacagcagccgcaaacacccgcacgacaggcggcgacaaccggaacgttattgctttccagcgcctccagtagcgtggtgccaaccggagcgtaaaattctcgtgccggttgcagtttggtgaatttcagaccgctggtcgccgcttccgctactggggtgaagaatttctctttaaagaaacgcgtcacgccgagcgctttcacttcctgctctacccaatccatatatggcgcagggccacaggtcatcacggtacgtgaggctaaatcagggacacctgccagcagttcgcgagtgagacgaccagcgataaagccttcggtaacgttattttccgccaccagcgttaccggatagttacgccactcatcggcgaaaatcacatcctgcggcgtacgcacgttgtagatcacctgcacatcggcctgtggacggttcttcgccagccagcgacgcatcgacataatcggcgtaacgccgcagcctgccgccagcaacaggaatttatcttctgctttatcgtcgcaggtaaattcccccatcgcgtccgaaagccagagataatcaccgcgttttacatcgcgcgtcagccaccgagagccgacaccgtcatcaatccgccgcacggtcagggtgatgtattcactcacgcctggcgtggaggaaatggtgtaagcacgcagcgtttccgctgagttacgcacgctgaccagcgcatattgcccggcgcgatacgggtagtaatcgtggcaaatcagggaaatcgtccacacatccggcgtttcttgcgtaatgtgatgaacctgcatccgccacgggcattgattcgttggcatcgtcatcgacaaactccttacgcgctcaacagttgcttcatgtcttcttcaacagtggtgatagaacgcaggccgaatttctcgttcagcaccgccagcaggtctggtgtcaggaaaccaggtgcagttgggccggtgacgatatttttcacacccagagaaagcagcgtcagcagaatgacaatcgctttctgttcaaaccaggagagcaccagcgacagcggcagatcgttcaccccacagcccagtttctctgccagcgttaccgccagaataattgctgagtaagcatcgttacactgaccagcatctaccagacgcggcagaccttcgatatcgccaaactcaagtttattaaagcgatatttaccgcaagcgagggtcaggatcaggcagtcatccggcacgctggtggcgaaatcggtgaagtagtgacgctcgccgcgtgcgccgtcacagccgccaagcaggaagatatgacgcagtttttcacggctcaccagatcaatcagcgtatcggctgcgccaagcagtgtctggcgaccaaagcccacggtgatcaggtgcggaatttcgctgtacgggaagcccgccatctgttgcgcctgggcaatgaccgcagagaaatcttcgccatccagatgacgcacacccggccagccaacgatgctgcgggtccagatacgatcgtcataagcgcctacggttgggtcgatgatgcagttcgaggtcatcacgatggggcctgggaaacgagcgaactccacttgctgattctgccagccgctgccgtagttaccgaccagatgcttgaatttacgcagctccgggtaaccatgcgcaggcagcatttcgccgtgggtgtagacattaacgcccgtgccttcggtctgttccagcaggttgtagagatctttgagatcgtgaccggaaatcagaatgcatttacccgccgtcgctttgacgttgacctgggttggcgtcgggtgaccgtatttaccggtttcgcctgcatccagaatgctcatcactttgaaattcatctggccgatttccattgaacactcaagaagcgcgttcatatcggcaggccaggtccccagccacgccatgattttatggtactgggcataaatatcgttgtcgtattgaccgagaacatgcgcgtgttccatataggccgccgcacctttcaagccatacaggcacagcagacgcaggccgagaatgttttcgccaatcgccgctttatctttgttaggggtaaattctgctgcctgacgttgcagctcgccgagatcgtcgctcaccagttgcaggtcagccatcgggttatcgacgcgggcgttggcatctacagccaggcattgtgctttcagcgcctcgcgcagggcaatcgcttcacgagcgtagccgacaatacgcggagaatcgaagttaacgttggtcagggttgagaaaaaggcacgtggcgcaaagctgtctacatcgtggttgatgatgccgtattcacgtgctttcactgcccaggccgaaagcccttgcagcgtcgcgatgagtaaatcctgaaggtcagaggtttccgccgttttgccacacatcccctgcgcgtatgagcagccgtttcctgccggagtacggatagtttgttcacattgcacacaaaacatgatcacaccttttaaagttatatttaatatacatgtttaaggttaagacgcttaacgcggggataaaagagatttttaatgcaactttaagggagattgatttagcgcaattttggcggcagagatctaccgccagagaggtattatgcagagaaaaaggcgatgagaatcggcactaacagactaagaataaaaccgtgaacaatcgccgccgggaccatatccagcccgcctgtacgttgaagaacgggcagggtgaaatccatcgacgtcgcaccgcataagcccagtgcagtagagcggctacggcgaatcagcccagggattaacataatagcaatcagctcacgggccagatcattaaaaaacgccgcgctcccgattaccggaccaaaggattcggtcaataaaataccggaaagagaataccagccgaaaccggaggccattgccagcgcggtattgatgggaagatcaagaataaaggcgttaattaaaccaccaattaatgaactggcaaccaccaccacggcgacaatcattccccggcgattaaggacaatctgctttaaggtcatgccattattgcgcaactgaataccgacgaggaaaagtagcagaattaaggtgtattcactggcttcggtcgcgtgttgtaagaaagccagtccactcagaccaatggcaaaaccaatcactactacgccgcacagttttagcgactccagcgccatcgcaatacgcgacgggagtttttcttgatgatggtggttgcgccatggcaggccgcgctccagccacatcagggcggcaatattacacagtaaaataacggtaatactgacggcagaataatgcagaattgccaacaagttactggcgaggttatcgagaaacgccagactgatacccataaaaaagagaataaggtaaaccatccaacttaatagctgattaataactcttaatgcagctttttggcgaagcggaatgaggtaacccacaatcaggggaaccagaatgattaacagcccagaaaacatgaaaaaccagtccttgcaaagaagattcgaaatgcgcgatgacacactactgaaagcggaaggacgagtaaagttgcaattaaaaggaaatgttatgcataaggatcggtagggtattcattttcatttaaagatattcttgcgctttaattacaaaccgcaccggtgttggtggcgtcaaaatcgccgaggcgttccctgaaggccggggcagcccacatggatgtgggctgagggcgcgttttacagggatgttacctcgcgcccgacccggtagccgtaagggataagtcgagggcaccgcgcagcggcgattttgttcgccagagcccgggggtgcagggggcggcggcgattggccgccccctgcacgctccttgcgccagtggcaatatgtggcttagctcatgaaaggagcgcaacaagatgatgaatcaacatataacaacatcttaaaaaaaggcctgacattgcgccaggccttctgcgttaattaatcgcgtttttccagtagagtccggtaaatcagaccaccgataataccgccgacaattggcaccacccagaagaaccacagttgttctaatgcccagccgccctggaagatagcaaccgcagtactgcgcgccgggttaacggaagtgttagtcaccggaatactgattaagtgaatcagggttaaggccagaccaatggcaattggcgcaaaaccagcaggagcgaatttgtcagttgcgccgtggatcaccagcaggaaacctgcactcaataccagttcaactaccagcgcggaaagcatggaataaccgcctggtgaatgctcgccataaccgttagaagcaaaaccgctggctgccgcgtcaaaacccgttttaccactggcaattaaatacagcagcgccgccgcaacaataccgccgacaacctgggcaattacgtagccaacgacttcttttgccgggaaacgtccgccagcccataaaccaatagtgaccgccgggttaaaatgaccaccagaaatatgaccaacagcaaaggccattgtcagaacggtcagaccgaacgccaacgccacgccggcaaaaccaatgcctaattccgggaagcctgcggccagtacggcactaccacagccgccaaaaacaagccagaaagtaccaaaacattcagctgctaattttctgaacatatccacctcaattaaaaattgaccctgtgaaaaatatggtcgttttatagggtcgtcgtaaaaaagtgacgacggaaatgatgcgcggctattttaaaaacgaaggcaagtcattcaccagataaataaatccagtaaatttgatttaaggcaacagcgggttgccccatatagtcatttgtctgattgacagtgtagtgcaagcgaaagatttaatcctttaggcgtaataaaaaataatttatcatgctaattatttgattttgttgtttttgcagacttgtcagcaagagggagtataacgcgattattcgctcatttttcagacatttgccatgcttaaatgtgatgtcatcacgtattagcatggcctttcccgttatactgccagcgtaaaggataagtcacatatttctggaggggatatgattcttgagcgcgttgaaattgtgggttttcgcggtatcaaccgtttgtcgttgatgctggaacaaaacaacgtcctgattggggagaacgcgtggggtaaatccagcttgctggacgccttaaccctgctgctatcgccagaatcagaactctaccattttgagcgcgacgatttctggttcccgccgggagatatcaacgggagagaacatcatctgcatattattttgaccttccgcgagtcgctgccaggccgacatcgggttcgccgctatcggccgctggaagcgtgctggacgccatgcaccgatggttatcaccgtattttttatcgtctggaaggggagagtgcggaagacggcagcgtgatgacactgcgcagttttctcgataaagacggacatccgattgatgttgaggatattaacgatcaggctcgtcatctggtgcgtttaatgccggtgctgcgcttgcgtgatgcccgttttatgcgccgtattcgtaacggcacggtgccaaatgtccccaatgtggaagtcaccgcgcgccagctcgatttcctcgcccgtgaattatcctcacatccgcaaaatctctctgatgggcagattcgtcagggactttccgcaatggtgcaacttcttgagcattatttttctgagcagggggccggacaggcgcgatatcgtttaatgcggcggcgagccagcaatgagcaacgaagctggcgctatctggatatcatcaaccggatgattgaccgacctggagggcgctcgtatcgggttattttgctcggcctgtttgctactttattgcaggcaaaaggcacattgcgactggataaagacgcccgtccattgttgctgatcgaagatccagaaacccgtttgcaccccattatgctttcagttgcctggcatctgttgaaccttctgccattgcagcgcatcgctactaccaactcgggagagttgctttcgttaacgccggtagagcatgtttgccgactggtacgagagtcctctcgcgttgccgcctggcgtctgggaccgagtggcttgagtaccgaagatagccgacgcatctcctttcacattcgttttaaccgtccgtcatcgctgtttgcccgctgttggctgctggtggaaggggaaacggaaacctgggttatcaatgaactggcgcgtcagtgcggacatcattttgatgccgaagggatcaaggtcattgagtttgcccagtccggactaaagccactggttaaatttgcccggcgaatggggattgaatggcatgtactggtcgatggcgatgaagcagggaagaaatatgccgctacggtacgcagcctgttgaataacgatcgggaagccgaacgagaacatttaacggcgttaccggcgctggatatggaacattttatgtatcgccagggattttccgatgtgttccaccgcgtggcgcaaatcccggaaaatgtaccgatgaatctgcgcaaagttatctcgaaagcgatccatcgctcttccaaacccgatcttgccattgaagtggcaatggaggccggacgtcgtggtgtggactccgtaccgacgctgctgaaaaaaatgttctcacgcgtgctgtggctggcgcgcggtcgggccgactaactacaaaacatcgtggccatttgtggctgaatagcgtcgagcatctcatagcgccgacggtattcagcccgttttttactggcgatttcggcaatctcttttcgtgctatctgtgctggaaggcggtaatggcgttcagcatcacatacgccgccaaccgattcccagaaagcgttgtaatcggcatggatcttgccttctttatcgcgataacgcaggctgcggtaaatatgcgtttcattgctgacggcaataatctgctctacctgcaaacgttgggcaaacagacaggccgcttccatcacgaggcgtttgggaaatagcccgtggcaggctttcgtcgcattctggatttcctggtgtggaatttcccattttgcgccttgcagtccgccaataaacatcgtccttttcccctgatattcacacagggtaaaagtgagctctgccagaggaataccttcgctgttgcggaacaggatggtgctgtcaccttctttatccattgagatcatcatggtcagctcaagcgtgaactgctcgccgtttttgccttccagcttcgccagttgcagcccgggggtattcaaatataagctgaattcttccgccgacatacacccgcggagtaacgcataatggtaacgtaacgcctccagcaattgcttacggctaagattcgccgcaaggtaagggcgatgcagacgtacaggcagtcgcggctggcgcgttaacaacacattgagattaggccagtgggaaagttcgttcatccactcaacgcttaaacgcggcataatcaacgagcgcagcaaaaatttctggcgaaaactacggcgatgccagaatttacccggccgacactgtcctcgtgccagactaagaaaaagtgacaggctgctgagagattcagatggcgtaaaggtccgttcagttagctgcgacatattcatgaaatcaatggttatacatgacgtcgatttaaccattgcgtatcttaaccaaacatcaatagtgtgattattaacgtaaattttagtgttttgttgatatttcgttgaagttaatgacccggattggcatatggagtattcagaatatttatgaaaaagcggaaaaccgtgaagaagcgttacgttattgcgatggtgatagtcatcgccgggttgattacgttatggagaattcttaacgcacccgtgccgacttatcagacgctgattgtgcgccccggtgatttacagcaaagcgtgctggcgaccggaaagctggacgcgctgcgtaaggttgacgtgggcgcgcaggtcagcggtcagttgaaaacgctgtcggtggcgattggcgataaagtaaaaaaagaccagcttttaggggttattgatcctgaacaggctgaaaaccagatcaaggaggtggaagcaacgctgatggagctacgcgcgcagcggcagcaggcggaagcggagctgaaactggcgcgggtgacgtattcccgtcagcaacgtcttgcacaaacgcaagcggtttcacagcaggatctcgataacgccgcgacggagatggctgtgaaacaggcgcaaattggcaccattgacgcgcaaatcaagcgcaatcaggcctctctcgatacggctaaaaccaatctcgattacacccgcatcgttgccccgatggccggggaagtcacgcaaatcaccactctgcaaggccagacggtgattgccgcacaacaagcaccgaacattctgacgctggcagatatgagcaccatgctggtaaaagcgcaggtttctgaagcggatgtaatccacctgaagccggggcaaaaagcctggtttacggtgcttggcgatccactgacgcgctacgaggggcaaatcaaggatgtgctaccgacgccggaaaagattaacgacgctattttctattacgcccgttttgaagtacccaaccccaatggtttactgcggctggatatgaccgcgcaagtgcatattcagctcaccgatgtgaaaaatgtgctgacgatccctctgtcggcgttaggcgatccggttggcgataatcgttataaagtcaaattgttgcgtaatggtgaaacacgcgagcgtgaagtgacgattggcgcacgtaacgataccgatgttgagattgtcaaagggctggaagcgggcgatgaagtggtgattggtgaggccaaaccaggagctgcgcaatgacgcccttgctcgaattaaaggatattcgtcgcagctatcctgccggtgatgagcaggttgaggtgctgaagggcatcagcctcgatatttatgccggtgagatggtggcgattgtcggcgcttcgggttccggtaaatcgaccctgatgaatattctcggctgcctggataaggccaccagcggcacctatcgcgtcgccggtcaggatgttgccacgctggacgccgatgcgctggcgcaactgcgccgcgagcatttcggctttattttccagcgttaccatttgctttcgcatttaaccgccgagcaaaacgttgaagtacccgccgtctatgccggtcttgagcggaaacagcggctgcttcgcgcccaggagttactgcaacgactggggctggaagaccgtacagagtattacccggcacagctttcgggtggccagcaacagcgcgtcagcatcgcgcgggcattgatgaacggcggtcaggtaattcttgccgatgaaccgaccggcgcactggacagccattctggcgaagaggtgatggcgatcttgcatcagctgcgcgatcgcgggcatacggtgattatcgtcacccacgatccgcaggttgctgctcaggccgagcgggtgatcgaaattcgcgacggcgaaattgtgcacaatcctcccgccgttgaaaaagtgaatgctactggcgggacggaacctgttgtcaacacggcgtctggctggcggcagtttgtcagcggttttaacgaggcgctgacgatggcatggcgggcgctggcagcgaataaaatgcgtactttactgaccatgctggggattataatcggtattgcgtcggtggtttccattgtcgtggtgggcgacgccgccaaacaaatggtactggcggatattcgttctattggtacgaatactattgatgtctatcccgggaaagattttggcgatgacgatccgcaatatcagcaggcgctgaagtacgatgacttaatcgccatccaaaaacaaccgtgggtcgcttcagccacacctgccgtctcgcaaaacctgcgcctgcgttataacaatgttgatgttgctgccagtgccaatggcgtgagcggcgattattttaatgtctatggcatgaccttcagtgaaggaaacacctttaatcaggagcagctgaacggtcgtgcccaggtcgtggttctcgacagtaatactcgccgccagcttttcccccataaagcagatgtggttggcgaggtgattctggtcggcaatatgcccgccagagtcattggtgtggcggaagaaaaacagtcgatgtttggtagcagtaaagtgctgcgtgtctggctaccttacagcacgatgtccgggcgagttatgggccagtcgtggcttaactccattactgtcagggtgaaagaaggatttgacagcgccgaggcggaacagcaactcacgcgtttactttcactgcgccacggtaagaaggatttctttacctggaacatggacggcgtcttgaaaaccgttgaaaagaccacacgtactttacaactgtttctgacgctggtggcggtgatttcagctggtagtgggcggtattggtgtaatgaatattatgctggtgtcagtgaccgagcggacgcgggaaattggcattcgcatggctgtaggtgcgcgagcaagcgatgttttgcaacagttcctgatcgaagccgtactggtttgcctggtcggtggcgcgttgggaataacactgtcactgttaattgctttcaccttacagcttttcttacccggctgggagattggtttttcaccgttggcgctgctgctggcgtttctctgctcgacggtcaccgggattttatttggctggttacccgcacgaaatgcggcacgactggatccagtagatgctctggcacgagagtaatttttgagataaaaatgccagccgatcgggctggcattttgcctttaggatgtacacaatgagacagaagagctatgcgactgccgcttctacttcgacgggcacaataacactggcgtgattgccttttggcccctggtggacatcaaactgaacggattgtccagcttttagcgttctgtaaccatccatctgaatggtagaataatgagcgaaaatatcttcgccgccgccttcagggcagatgaaaccaaaccctttggcattgttgaaccacttaacagtacccttttccatgcttcgacatccttcgcaaatcttatacaagtaagatggaataaaccggggtcagagagggggctgttcaaaacctcgccaactctagaaatacaatttagagaattagggcgagccgtcaagcatttgacaggggccagggggcaggtatgaatcaaaaatttgaagcagttaacgctattgacaggaatgtgacagatgtcgctgatgctaacgatagatgatagttatctatcatgtggagtaaattggtcaggcaaataagctcttgtcagcggcagggcgttctgccgataaccgtaaccgaagatgataactgacaatgggtaaaacgaacgactggctggactttgatcaactggcggaagaaaaagttcgcgacgcgctaaaaccgccatctatgtataaagtgatattagtcaatgatgattatactccgatggagtttgttattgacgtgttacaaaaattcttttcttatgatgtagaacgtgcaacgcaattgatgctcgctgttcactaccaggggaaggccatttgcggagtctttaccgctgaggttgcagaaaccaaagtggcgatggtgaacaagtacgcgagggagaatgagcatccattgctgtgtacgctagaaaaagcctgaatgcaggcataaaaattgggggaggtgcctatgctcaatcaagaactggaactcagtttaaatatggctttcgccagagcgcgcgagcaccgtcatgagtttatgaccgtcgagcacttgttactggcgctgctcagtaacccatctgcccgggaggcgctggaagcgtgttctgtggatttggttgcgctccgtcaggaactggaagcctttattgaacaaaccacacccgttctgcctgccagtgaagaggagcgcgacacacagccgacgctgagttttcagcgtgtactgcaacgtgcggtcttccatgtccagtcctccggtcgcaatgaggttaccggtgcaaacgttctggtcgctatctttagcgaacaggagtcgcaggcggcatatctgttgcgcaaacatgaagtcagccgtctcgatgtggtgaactttatctctcatggcacgcgtaaagacgagccgacacagtcttctgatcctggcagccagccaaacagcgaagaacaagctggtggggaggaacgtatggagaatttcacgacgaacctgaatcagcttgcgcgagtgggcggaatcgacccactgattggtcgtgagaaggagctggagcgtgctattcaggttctctgccgtcgccgtaaaaacaacccgctgctggtgggggagtctggtgtcggtaaaaccgcgattgcggaggggcttgcatggcgaattgttcagggcgatgtgccggaagtgatggctgactgtacgatttactctctcgatatcggttctctgttagcgggcacaaaatatcgcggcgactttgaaaaacgttttaaagcgttgctcaagcagctggagcaagacactaacagcatcctgtttattgatgagatccacaccattatcggtgcgggtgcagcgtctggtggccaggtcgatgcggctaacctgattaaaccgttgctctccagcggtaaaatccgcgtaattggttcgacaacctatcaggagttcagcaacattttcgagaaagaccgtgctctggcgcgtcgcttccagaaaattgatattactgaaccgtcaatcgaagaaactgttcaaatcatcaatggcctgaaaccgaagtatgaagcgcaccacgacgtgcgttataccgcaaaagcggtgcgtgctgcggtagagctggcggtgaaatacattaacgatcgtcatctgccggataaagcgattgatgttatcgacgaagcgggcgctcgcgcacgtctgatgccggtaagcaaacgcaagaaaaccgttaatgtggcggatattgaatccgtggtggcccgtattgcacgcattccagagaagagtgtttctcagagtgaccgcgataccctgaaaaacctcggcgatcgcctgaaaatgctggtcttcggtcaggataaagccattgaggcgctgactgaagccattaagatggcgcgtgcaggtttaggtcacgaacataaaccggtcggttcgttcctgtttgccggccctactggggtcgggaaaacagaggtgacggtacagctttcgaaagcgttgggcattgagcttctgcgctttgatatgtctgagtatatggaacgccataccgtcagccgtctgattggtgcgcctccgggatacgttggttttgatcagggcggtttgctgactgatgcggtcatcaagcatccacatgcggtgctgctgctggacgaaatcgagaaagcgcacccggacgtgttcaacatcctcttgcaggtgatggataacggtacgctgaccgataacaacggacgcaaagcggacttccgtaacgtggtgctggtgatgaccactaacgcgggggtacgtgaaaccgagcgcaaatccattggtcttatccaccaggataacagcaccgatgcgatggaagagatcaagaagatctttacaccggaattccgtaaccgtctcgacaacattatctggttcgatcatctgtcaaccgacgtgatccatcaggtggtggataaattcatcgtcgagttgcaggttcagttggatcagaaaggtgtttctctggaagtgagccaggaagcgcgtaactggctggccgagaaaggttacgaccgggcaatgggcgctcgtccgatggcgcgtgtcatccaggacaacctgaaaaaaccgctcgccaacgaactgctgtttggttcgctggtggacggcggtcaggtcaccgtcgcgctggataaagagaaaaatgagctgacttacggattccagagtgcacaaaagcacaaggcggaagcagcgcattaatctgattgtcaggtaggttggtcaagtccgtaatctcgaaagaggttgcggactttttatttatggggtggaacggtgaaaaccctatttttggaggtgaaggtaagttgttgataattagtgctgctggaaaaggtaaggataaaaaagggtgacagcaggaaaatgagatggttttgctttattaacaacggactaaacgtgtagtatttgagttcactgccgtacaggcagcttagaaaggaacaatcttgcaaaggctgtgaaagttggcgttcactgccgtacaggcagataaaatgcgaaaaaaactcgtactttcgtacgagctcttctttgaatatggcggtgagggggggattcgaacccccgatacgttgccgtatacacactttccaggcgtgctccttcagccactcggacacctcaccaaattgttttgctaccaaacctcatgggtggcaacggggcgctactatagggagttggagtaaaacggtcaagaagaattttaatgataattattgtttgctcatactgtaaacaagttgtgcagtatatctacatcgagacaagttatggacttatacttccaaagtacttcatacatatcacaaaataaaaaggccggttaaaccgaccttttactcgttctttctcttcgcccatcaggcggtaaaacaatcagcgactacggaagacaatgcggcctttgctcaggtcgtacggggtcagttcaacagtcactttgtcgcccgtcaggatgcggatgtagtttttgcgcattttaccggagatgtgtgcagtaaccacgtgaccgttttctaactctacgcggaacatggtattaggcaacgtttcaagaacggtaccttgcatttcaatattgtcttctttggccatctaatcctctggggtatcactaccgtaatttgaaccggcaagataatgccgaagttctgtaaataagtaaagatttgcgcgctaaatcgcaacaaacaggttcggcacattactccgaaaacacacggctaagccgcaccaaaagcgcaacgtataagggagcggtgagataaacgataggcgttacctgacgcgaaaaattccttatcggcagcggggtaatgagcgtaaccaactctgcgaccgcaattataacactctggggagaaatgtgccgaaaacattcattcttgtggtgaaaacaagcaccgtggtacccagaaattattcggcaatcgtccgaggcgcatttgattgagataatttagataatcccggcggggaatttcgcaggcaccaagcgaagctgtgtgatcgttaaggacctggcagtcgataagtttaccgccatgaccaataaattcctcacagaagaccagtagcgccgttttggacgcgttttccatccggctgaacatggactcgccacaaaatagcgttccctgggccacaccgtacataccgccaacaagctcatcttcacaccagacttcgatggagtgggcatgaccgagttcgtgaagacgatggtaggcttcgaccacgccacgcgtgatccaggttccttcttcgcgatcgctggcacagccttcaatgacctgaccaaaggcgtaattcatcgtgacacgatagggcgagcgtttatgaaatcgtttcatactacggctgatatgcagtgattctggccatagcaccgcgcggggatcgggcgaccaccagaggatggggtcgcctggagaaaaccacgggaaaataccacgctgataagccattaataggcgcgcagggctaagatcgccccccagtgccagcaggccgttaggctcacgtaatgcgccttccggggaagggaaggctattgaatggcgagaaagctgaaccaggcgcatgaccgcaaaactccacgcaagtcggatcgttcaataatagcttacaaaccctgcttaaactggtaataacgcccctgtctggcaagcagttctgcgtgagtaccttgctcaataatttgcccgttgtccatcactattatttgttggaaacgagagagtccgcgaagtcgatgggtgaccattaacaccgttttctcgcacatcatttctgcaagcaattcaaggatctgactttcggttgtggcatctaagccttctgtaggttcatccagcaataccagcggcgcatcatgtaacagcgcacgggcgatagccagacggcgcagttcaccaccggagagctggcgtccgccttcacctaaccaactgttgagacctgcatcctcgagcagcttctccagaccaacgcgacgcaagatctccgccagagcctcatcactactaccaggcgaggcgagtaacagattatcacgcagcgtggcgctaaacagatgcactcgctggggaacaacgctgatggtctgtcgtagagccgcttcattcaggctggctatgggactatcgttaagcaaaatctcgccctgttgcgggtcccatgcgcgggtcagcagttgtaacagtgttgatttgccgcatccggttcgcccgagaatcgcaatatgttccccggcgtttacctgaagataaatccctttaagtgcctgttgggattgctccggataagtgaactgaacatcccgtaatgtcagcgaaacgcgatcggcaacacgagtttgggtatcagggaaggtgacttccggtttttgatccgttaaatcagtgatccgtacggcagaggcaatgacttgccccagatgctgaaatgcacccgttactggtgccagcgcttcaaacgcggctaacgcgcagaagacaaacagggcaattaacgcgccgggttgagcattgccgccaacgccgccggacgccatccacagcatcaggatcaccgctaacgcgccaatgagcagcattatcgcttgcgacaatgcggtcagttcagattgacggcgttgcgcttccagccactgaatttcggtattctctaattgcgtgcgataacgatcgctggcaccaaaaatggtcagctcagcttgcccttgcagccaggccgtcagttgttggcgatactgcccgcgaagatgagtcagattttgcccggtgctttttcccgcacgataaaacagcggtggcatcaggaaaagcgtcagtaacataatgccgcccagcgtaaaggcgagggtgaaatcaaggaaacttaacccgattgtcaccaccataatcaccacaaaagcgcccaccagcggcgagataacgcgcaggtaaagatgatcgagcgtatcaacatccgccaccacgcggttgagtaattcgccctgacgatagcgcgccagtccggcaggggagaggggcagcaatttgctgaaggtgtatatgcgcagatgctgcaacacgcggaaagtcgcgtcgtgacttatcagacgttcaaaataacgcccggcagtacgggtgattgctgcgccacgcacgcccgcagcgggtagcatatagttgaagctgtacagtccggcaacccccgcaaccgctgaggcggagaggaaccagcccgaaagtgtcaacagaccgatactggcgagcagcgtgacaattgccagcacgataccaagacttaacatccatttatgacgtttatacagtgccagatagggtagcaaagcgcgcatttaaatctcctcctgacgatgggccagtaatgtggcgaatgggccgccagccacacttaattccgcgtaacgtccttgctcaataatctgaccatcctgcattacccaaatgacatcccagtcagcaagatcttctaactggtgggtgaccattaacgttgtctggcgcagagaggcggcattcagcgcctccattacgcgctgttcactgtgagcatcaaggctggcagcgggttcatccaacagtaatagcgaacagggatttagtaacgcacgggccaccgccacgcgctgcgcctgccccacggaaaggcgggcagcctggtcgccaacaggcgtatcaaccccttgcggcaggagcggtagaaactcactgacccaggcgttatccagcgctgtttgtaactcttgttcgctggcatcaggtcgcgccagtagtacgttatcccgtaatgttgctgccggtaattgtgggttttgcccaacccaggagagatgtttacgccatgattccggtgataaatcgcgtaattctatcccgttgattcgtagcgatccctgatatgagagaaaaccagaaagcgcgttcagcagtgaacttttacctgaaccgctgcgaccaaccaacactgctcgttggcctgctggcaaagtaaaattcagcggtccggccagcgttttaccttccggcgacgtgataaacagatcctcggcttcaatggtcaccggatcggtcgatgctaattccgcctcaccgcgctgcggatgggcgagcggggtttccataaacgttttcaaactgtcagctgcaccaacagcctgggctttagcatgataaaacgtaccgagatcgcgtaatggctggaaaaactctggcgcaaggatcagggccagaaaacccgcagccagcgtcacgccagtatcgtagtgaccaaaatccagctcgccgaggtaggaaaaaccaaagtagaccgccaccagagcaatcgacagcgaggtaaaaaattcgagaatgccggaggataaaaacgccagccgtagcacttccattgtccgttggcggaaatcttccgaagcagaacgaatactttcaatttcagcttcaccacgaccaaaaatacgcaatgtttccatgccgcgcaggcgatcgaggaaatgcccacttaagcgagcaagagcgagaaagttacgtcggttagcatcggcagcccccattccaaccagcgccataaataacggaattagcggtgcagtgcccagcagaatgagcgccgcggcccagttagaggggaagatagccaccacaatcagcagcggcaccgacactgccagcgccatttgcggcaggtagcgtgcatagtaatcatgcatatcgtcaatttgctcgagtaccagcgtcgcccagctccccgctggtttaccctgaatccacgctggccctgcttgttgcagacggtcgagaacctgacggcggatggcaaagcggatatgctgcccggcgtgataacccacccgttcgcgtaaccagaccacccatgcgcgcagtacaaaggtcagaaacagtaacgtaaagggaagcagcagggcttcacggggaatattctccataatcatatgttgcagaattcgcgccatgaaccaggcctgggcaatgatcaatatgccgctcacaaagcccagcagacgagaaatattcagccaacgttgggagatgacgctttgctgttttaaccagcgggttaattctttttgacgggatttattcattgcacgcttagcaggtgagttatcagaattatttgcagagcaatgttacaacggggaaaaaataaaggcgacccatagtcgcatggtgtcgccttctttacttttgttactgatttgtaaaattattttgcgtcagctaaaccgtcgaggtagcgttccgcatcaagagctgccatgcagcctgtaccagcagatgtaatggcctggcgataaatgtgatccatcacgtcgcctgcggcaaagacgccagggatgctggtctgggtggcattaccatgaatacccgactgtactttgatgtagccgttttccagttccagctgcccttcgaaaatggcagtattcgggctgtgaccgatagcaacaaacagaccggcaacgtcgagtgactcgatgttatcgctgttttgcgtatcgcgcagacgaacgccagtgacacccatctgatcgccggtcacttcttccagcgtacggttggtgtgcagaataatgttgccgttctccactttatccatcagacgcttaatgaggattttttccgcacggaaaccatctcggcggtgaatcagatgaacttccgaagcgatgttagacagatacagcgcctcttcaaccgcggtattgccgccgccgatgaccgcaactttctggttgcgatagaagaaaccgtcgcaggttgcacaagcagaaactccacggcctttaaaggcttcttcagagggcaggccgagatagcgtgcagaagctccggtggcaataatcagcgcgtcgcaagtgtattcgccgctatcgccagtcagacggaacggacgattctgcaaatcaactttgttgatgtgatcaaagatgatttcagtttcaaatttggtggcatgttcgtgcatgcgctccattaataacggaccggtcagatcgtttggatcgccaggccagttttccacttccgtggtggtggtcagttggccgcctttttccatgccggtaatcagcacaggttgcaggttggcgcgcgccgcgtagacagcagcggtgtatcccgctgggcctgaacccaggataagcagtttactgtgtttggtcgtgcccatgagatccccatagttgttggcagacaatggcaggattgtagggaatttacagacgtaaaaaaagagtatgacgattttgttaacaatttgtgcaatcggcagcatcgataagcaggtcaaattctcccgtcattatcacctctgctacttaaatttcccgctttataagccgattaaatgatgaataaacgcccctgttaatgaatatctggcatgttgtactaaaaatcgatgttttgctttgacaatcccctggtgttttgcgaaaacattcgaggaagaaaaaaaacagtattcttatatgcgcataaccatgcatgtaaataccatgtttaccgtgctagtgaaatctacgtatggcgtggacagacgccattcgtgatgtcgatagctgccacaaggcaacggtcttctcaccgtagacccaggcattgcgcgccgtgaatcttcatgatttcggtctatcgtgacgggtagcgactctgaacagtgatgtttcagggtcagacaggagtagggaaggaatacagagagacaataataatggtagatagcaagaagcgccctggcaaagatctcgaccgtatcgatcgtaacattcttaatgagttgcaaaaggatgggcgtatttctaacgtcgagctttctaaacgtgtgggactttccccaacgccgtgccttgagcgtgtgcgtcggctggaaagacaagggtttattcagggctatacggcgctgctgaacccccattatctggatgcatcacttctggtattcgttgagattactctgaatcgtggcgcaccggatgtgtttgaacaattcaataccgctgtacaaaaacttgaagaaattcaggagtgtcatttagtatccggtgatttcgactacctgttgaaaacacgcgtgccggatatgtctgcttaccgtaagttactgggggaaaccctgctgcgtctgcctggcgtcaatgacacacggacatacgttgttatggaagaagtcaagcagagtaatcgtctggttattaagacgcgctaacacggaacaggtgcaaaatcggcgtattttgattacactcctgttaatccatacagcaacagtactggggtaacctggtactgttgtccgttttagcatcgggcaggaaaagcctgtaacctggagagcctttcttgagccaggaatacactgaagacaaagaagtcacattgacaaagttaagtagcggccgccgtcttctggaggcgttgctgatccttattgtcctgtttgccgtctggttgatggctgccttactaagctttaacccttcggaccccagctggtcgcaaacggcctggcatgaacctatccataatttaggtgggatgcccggtgcgtggttggcagatacgctgttctttatttttggcgtgatggcttacaccattcccgtcattattgtcggcggttgttggtttgcctggcgtcatcagtccagcgacgaatacattgattattttgccgtttcgctacgcatcattggcgttttggcgctcatccttacctcctgtggtctggcggcaatcaacgctgacgatatctggtattttgcctccggtggcgtcattggcagcttactaagcactacgctacaaccactgctacacagtagcgggggaactattgcgctgctctgcgtttgggcagcgggcctgacgctgttcaccggttggtcatgggtgaccattgctgaaaaactcggcggctggattttaaatattcttaccttcgccagtaatcgtacccgtcgcgatgatacctgggtcgatgaagatgagtatgaagacgacgaagagtatgaagatgaaaatcacggcaaacagcatgaatcacgccgtgcccgtattcttcgcggcgcgctagcgcgtcgtaaacggttggcggaaaaattcattaatccgatggggcggcaaacagatgctgcgctgttctccggtaagcggatggatgatgaagaagagattacctacactgcacgcggtgtggctgctgaccctgacgacgtcctgttttcgggcaatcgtgcaacgcagccagaatatgacgaatacgatccattattaaacggtgcgccaattaccgaacctgttgctgtagcagctgctgctaccacggcgacacaaagctgggctgcaccggttgaacctgtgactcagacgccgccagttgcctctgttgatgttccacctacgcaacctacagtagcctggcagcctgtaccggggccgcaaacgggagaaccggttattgcacctgcaccggaaggttacccacaccagtcacaatatgcgcagcctgcagtgcaatataatgagccgctgcaacaacctgtacagccacagcagccgtattatgcgcctgcggctgaacaacctgtgcaacaaccttactacgctcctgcggcggaacaacctgttcagcaaccgtattacgcccctgcgccagaacaaccggtggcaggtaacgcctggcaagccgaagagcagcaatccacttttgctccacagtctacataccagacggagcaaacttatcagcagccagctgctcaggagccgttgtaccaacagccgcaacccgttgaacagcagcctgttgtggagcctgaacccgttgtagaagagacaaaacccacgcgtccgccgctttactattttgaagaagtggaagagaagcgagcccgtgaacgtgaacaacttgcggcctggtatcaaccgattccagaaccggttaaagaaccggaaccgatcaaatcttcgctgaaagcaccttctgttgcagcagtacctccagtagaagccgctgccgctgtttctccgctggcatctggtgtgaaaaaagcgacactggcgacgggggctgccgcaaccgttgccgcgccagtcttcagtctggcaaatagcggtggaccgcgtccgcaggtcaaagaggggattggcccgcagttgccacgaccgaaacgcatccgcgtgccaactcgtcgtgaactggcgtcttacggtattaagctgccctcacagcgtgcggcagaagaaaaagcccgcgaagcccagcgtaatcagtacgattctggcgatcagtacaacgatgatgaaatcgatgcgatgcagcaggatgaactggcacgtcagttcgcccagacgcagcagcaacgctatggcgaacagtatcaacatgatgtgcccgtgaacacagaagatgcagatgctgcggcagaggcagaactggctcgtcagtttgctcaaactcaacaacaacgttattccggcgaacaaccggctggggcgaatccgttctcgctggatgattttgaattttcgccaatgaaagcgttgctggatgatggtccacacgaaccgctgtttacgccaattgttgaacctgtacagcagccgcaacaaccggtagcaccgcagcagcaatatcagcagccgcaacaaccggtagcaccgcagccgcagtatcagcagccgcaacaaccggttgcaccgcagccgcagtatcagcagccgcaatatcaacagccgcaacaaccggttgcaccgcagcagcaatatcagcagccacaacagccggttacacagcagccgcagtatcagcagccgcaacagccggttgtaccacagccgcaggataccctgcttcatccgctgttgatgcgtaatggcgacagccgtccgttgcataaaccgacgacgccactgccttctctggatttgctgacaccgccgccgagcgaagtggagccggtagatacctttgcgcttgaacaaatggcgcgcctggtagaagcgcgtctggctgatttccgtattaaagccgatgttgtcaattactctccggggccagttatcactcgctttgaattgaacctggcaccgggcgtaaaagcagcgcgcatttctaacttgtcacgtgaccttgcccgttcactttcgacggtggcggtgcgtgtcgttgaagttattcctggcaaaccctatgtaggtctggagttaccgaataaaaaacgacaaaccgtttatctgcgcgaagttttggataacgccaaattccgcgataatccgtcgccattaaccgtggtgctgggtaaagatatcgccggtgagccggtggttgccgatctggcgaaaatgccgcacttgttggttgcggggactaccggttccggtaagtctgtcggggtgaatgcgatgatcctgagcatgctttataaagcacagccagaagatgtacgtttcatcatgatcgacccgaaaatgctggagctttcggtttatgaaggcattccgcacctgttaacggaagttgttactgatatgaaagatgccgccaacgcgctgcgctggtgtgttaacgagatggagcgtcgttataaactgatgtctgcgctgggtgtgcgtaatctggcgggttataacgaaaaaattgctgaagccgatcgcatgatgcgtccgattccagacccgtactggaagccgggtgatagtatggatgcgcagcatccggtgctgaaaaaagaaccatacattgtggtgttggtggacgaatttgccgacctgatgatgacggtaggtaaaaaagtggaagagctgatagcacgtctggcgcaaaaagcccgtgccgcgggtatccacctcgtactggcaacgcagcgtccatcggttgatgttattactggtctgattaaagcgaatattccgacccgtatcgcctttaccgtatccagtaagattgactcacgtaccattcttgatcaggctggtgcggaatcactgctgggtatgggggatatgctctactctgggccgaactccacgttgccggtacgtgtccatggtgcttttgttcgcgatcaggaagttcatgccgtggtgcaggactggaaagcgcgtggtcgcccacagtatgttgatggcatcacctccgacagtgaaagcgaaggtggcgtgggcggtttcgatggcgctgaagaactggatccgttgttcgatcaggcggtgcagtttgtcactgaaaaacgcaaagcgtcaatttctggcgtacagcgtcagttccgcattggttataaccgtgcagcgcgtattatcgaacagatggaagcgcaggggattgtcagcgaacaggggcacaacggtaatcgtgaagtgctggccccaccgccatttgactaattaatgcaacgtagaccggataagacgcgatagcgtcgcatccggtattctatcaactgaaaattcagtattttcttctttcctcaagctgattattagcctggaatagagagtagagggaactcccgattgggagtgacgtaatttgaggaataatgatgaaaaaaattgccatcacctgtgcattactctcaagcttagtagcaagcagcgtttgggctgatgccgcaagcgatcttaaaagccgcctggataaagtcagcagcttccacgccagcttcacacagaaagtgactgacggtagcggcgcggcggtgcaggaaggtcagggcgatctgtgggtgaaacgtccaaacttattcaactggcatatgactcaacctgatgaaagcattctggtttctgacggtaaaacactgtggttctataacccgttcgttgagcaagctacggcaacctggctgaaagatgccaccggtaatacgccgtttatgctgattgcccgcaaccagtccagcgactggcagcagtacaatatcaaacagaatggcgatgactttgttctgacgccgaaagccagcaatggcaatctgaagcagttcaccattaacgtgggacgtgatggcacaatccatcagtttagcgcggtggagcaggacgatcagcgcagcagttatcagctgaaatcccagcaaaatggggctgtggatgcagcgaaatttaccttcaccccgccgcaaggcgtcacggtagatgatcaacgtaagtagaggcacctgagtgagcaatctgtcgctcgatttttcggataatacttttcaacctctggccgcgcgtatgcggccagaaaatttagcacagtatatcggccagcaacatttgctggctgcggggaagccgttgccgcgcgctatcgaagccgggcatctgcattctatgatcctctgggggccgccgggtaccggcaaaacaaccctcgctgaagtgattgcccgctatgcgaacgctgatgtggaacgtatttctgccgtcacctctggtgtgaaagagattcgcgaggcgatcgagcgcgctcggcaaaaccgcaatgcaggtcgccgcactattctttttgttgacgaagttcaccgtttcaacaaaagccagcaggatgcatttctgccacatattgaagacggcaccatcacttttattggcgcaaccactgaaaacccgtcgtttgagcttaattcggcactgctttcccgtgcccgtgtctatctgttgaaatccctgagtacagaggatattgagcaagtactaactcaggcgatggaagacaaaacccgtggctatggtggtcaggatattgttctgccagatgaaacacgacgcgccattgctgaactggtgaatggcgacgcgcgccgggcgttaaatacgctggaaatgatggcggatatggccgaagtcgatgatagcggtaagcgggtcctgaagcctgaattactgaccgaaatcgccggtgaacgtagcgcccgctttgataacaaaggcgatcgcttttacgatctgatttccgcactgcataagtcggtacgtggtagcgcacccgatgcggcgctctactggtatgcgcgaattattaccgccggtggcgatccgttatatgtcgcgcgtcgttgcctggcaattgcttccgaagatgtcggcaatgccgacccacgggcgatgcaggtggcaattgcggcctgggattgctttactcgcgttggcccggcggaaggtgaacgcgccattgctcaggcgattgtttacctggcctgtgcgccaaaaagcaacgctgtctacactgcgtttaaagccgcgctggccgatgctcgcgaacgtccggattatgacgtgccggttcatttgcgtaatgcgccgacgaaattaatgaaggaaatgggctacgggcaggaatatcgttacgctcatgatgaagcaaacgcttatgctgccggtgaggtttacttcccgccggaaatagcacaaacacgctattatttcccgacaaacaggggccttgaaggcaagattggcgaaaagctcgcctggctggctgaacaggatcaaaatagccccataaaacgctaccgttaatgttatcgttgcggtaatgttgttaatgtatccctgtggtcgcaggctgtggccacatctcccatttaattcgataagcacaggataagcatgctcgatcccaatctgctgcgtaatgagccagacgcagtcgctgaaaaactggcacgccggggctttaagctggatgtagataagctgggcgctcttgaggagcgtcgtaaagtattgcaggtcaaaacggaaaacctgcaagcggagcgtaactcccgatcgaaatccattggccaggcgaaagcgcgcggggaagatatcgagcctttacgtctggaagtgaacaaactgggcgaagagctggatgcagcaaaagccgagctggatgctttacaggctgaaattcgcgatatcgcgctaaccatccctaacctgcctgcagatgaagtgccggtaggtaaagacgaaaatgacaacgttgaagtcagtcgctggggcaccccgcgtgagtttgactttgaagttcgtgaccatgtgacgctgggtgaaatgcactctggcctcgactttgcagccgcagttaagttgactggttcccgctttgtggtaatgaaagggcagattgctcgcatgcaccgcgcactgtcgcagtttatgctggatctgcataccgaacagcatggctacagtgagaactatgttccgtacctggttaaccaggacacgctgtacggtacgggtcagctgccgaaatttgctggcgatctgttccatactcgtccgctggaagaagaagcagacaccagtaactatgcgctgatcccaacggcagaagttccgctgaccaacctggtacgcggtgaaatcatcgatgaagatgatctgccaattaagatgaccgcccacaccccatgtttccgttctgaagctggttcatatggtcgtgacactcgtggtctgatccgtatgcaccagttcgacaaagttgaaatggtgcagatcgtgcgcccggaagactcaatggcggcgctggaagagatgaccggtcatgcggaaaaagtcctgcagctgctgggcctgccgtaccgtaaaatcatcctttgtaccggcgacatgggctttggcgcttgcaaaacttacgacctggaagtatggatcccggcacagaacacctaccgcgagatctcttcctgctccaacgtttgggatttccaggcacgtcgtatgcaggcacgttgccgtagcaagtcggacaagaaaacccgtctggttcataccctgaacggttctggtcttgctgttggtcgtacgctggttgcagtaatggaaaactatcagcaggctgatggtcgtattgaagtaccagaagttctgcgtccgtatatgaacggactggaatatattggctaatacccaatttttctgaatctaaaaagcgcctgcgggcgctttttttgtctccctttgataccgaacaataattactcctcacttacaagtaatactactttcgagtgaaaatctacctatctctttgattttcaaattattcgatgtatacaagcctatatagcgatctgctatagaaataattacacaatacggtttgttactggaatcaatcgtgagcaagcttgagtgagccattatgaaaacgaaaatccctgatgcggtattggctgctgaggtgagtcgccgtggtttggtaaaaacgacagcgatcggcggcctggcaatggccagcagcgcattaacattaccttttagtcggattgcgcacgctgtcgatagcgctattccaacaaaatcagacgaaaaggttatctggagcgcctgtacagttaactgtggtagtcgctgcccgctacgtatgcacgtagtggacggtgaaatcaaatatgtcgaaacggacaataccggcgatgacaattacgacggcctgcaccaggttcgcgcctgtctgcgtgggcgttccatgcgtcgccgtgtctacaatccggaccgcctgaaatatccgatgaaacgagtcggggcgcgcggtgaaggcaaattcgagcgcattagctgggaagaagcctacgacatcatcgcgaccaaaatgcagcgcctgatcaaagagtacggcaacgagtctatctatctgaactatggcaccggtacgctgggcggcaccatgacccgctcgtggccgccgggaaataccctggtcgcgcggctaatgaactgctgcggcggttatctgaaccattatggcgactactcctccgcgcaaattgcggaaggtctgaactatacctacggcggctgggcagatggtaacagcccgtcggatatcgaaaacagtaaactggtagtgctgtttggtaataaccctggcgaaacgcgaatgagtggcggtggggtgacttactatcttgaacaggcgcgccagaaatctaatgctcgcatgatcatcatcgatccgcgctataccgacaccggtgccgggcgtgaagatgagtggatccctattcgtccgggaacagatgccgcactggttaacggtctggcgtatgtcatgatcaccgaaaacctggtagatcaggaattcctcgataaatattgcgttggctacgacgagaaaaccctgccagccagtgcgccgaaaaatggtcactataaagcttatattctgggtgaaggacccgatggcgtggctaaaacaccggaatgggcctcgcaaatcaccggtgttccggcagacaaaatcatcaaactggctcgtgaaatcggcagtaccaaaccggcgtttatcagccagggatggggcccgcagcgtcatgctaacggtgaaatcgcaacccgtgctatctcgatgctggcgattctgaccggtaacgttggtattaacggggggaacagcggcgcgcgcgaaggttcatacagcttaccgtttgtccgtatgccgactctcgaaaacccgatccagaccagcatttctatgtttatgtggaccgatgccattgaacgtggcccggaaatgacggcgctgcgtgatggtgtgcgcgggaaagataagctggatgtgccgatcaaaatgatctggaactatgccggtaactgcctgattaatcagcattctgaaatcaaccgtacccatgaaatccttcaggatgataagaagtgcgagctgattgtggttatcgactgccacatgacctcatcggcgaaatatgctgacatcttgctgcctgactgcaccgcttccgaacagatggactttgcactggatgcatcctgcgggaatatgtcttacgttattttcaatgatcaggtcattaaaccgcgctttgaatgtaagactatctatgagatgaccagcgaactggcaaaacgtcttggcgtcgaacaacagtttactgaaggtcgtactcaggaagagtggatgcggcatctgtatgcccagtcgcgggaagcgattcctgaactgccaacgtttgaagagttccgtaagcaggggatctttaaaaagcgcgatccgcaagggcatcacgttgcttacaaagccttccgtgaagatccgcaggctaatccattgaccacgccatcgggcaaaattgagatctattcacaggcgctggctgacattgccgctacctgggaattgccagaaggtgatgtgatcgatccactgccgatctatacgccgggctttgaaagttatcaggatccgctgaacaaacagtatccgctgcagcttacgggtttccactataaatctcgcgttcactcaacttacggcaacgttgatgtgctgaaagcagcttgccgtcaggaaatgtggatcaacccgcttgatgcgcaaaaacgcggtatcagcaacggcgataaagtcaggatctttaatgatcgtggtgaggttcatattgaggcgaaagtgacgccacgaatgatgccgggtgtggtcgcactgggtgaaggtgcctggtatgacccggatacaaaacgtgtcgataagggcggttgtattaacgtactgaccactcaacgtccgtctcctcttgccaaggggaatccatcacatacgaaccttgttcaggttgaaaaggtgtaaggagtaaccgatgacaacccagtatggattttttattgattccagccgttgcaccggttgcaaaacctgcgagctggcttgtaaagactacaaagatttgacgccagaagtcagcttccgccgcatttatgaatatgctggtggcgactggcaggaagataacggtgtctggcaccagaacgtgtttgcctactatctgtcgatttcatgtaaccactgcgaagatccggcttgtaccaaagtctgcccaagcggtgcgatgcataaacgtgaagatggttttgtcgttgtcgatgaagatgtgtgtattggctgtcgttactgccatatggcctgcccgtatggcgcaccgcagtacaacgcaaccaaaggtcatatgaccaaatgtgatggttgctatgaccgcgtcgcagaaggtaaaaaaccgatctgcgtcgaatcttgcccgctacgggcgctggatttcggacctatcgacgagctgcgtaaaaaacacggcgatctggcggctgttgcgccgttgccgcgtgcgcacttcaccaaaccgaatattgtgatcaaacctaacgccaatagccgcccaaccggggataccactggctatctggcaaacccgaaggaggtgtgagatgggaagtggatggcatgaatggccgctgatgatcttcacggttttcgggcaatgtgtagcgggtggttttatcgttctggctttggcgctgctcaaaggcgacctgcgagcagaagcccagcagcgtgttatcgcctgcatgttgggtttatgggtgctgatgggcattggctttatcgcctctatgcttcatcttggttcaccgatgcgcgcttttaactcgctcaatcgggtaggggcttcagcactcagtaacgaaatcgccagcggttcgatcttttttgctgtaggcggcatcggctggttgctggcaatgctgaaaaagctttcaccggcattgcgtacgctttggctggtggtgacgatggttcttggcgtagtctttgtctggatgatggtgcgtgtgtataacagcatcgatacagtacccacctggtacagcatctggacactgatgggcttcttcctgacgatgtttatgggcggcccgttactgggttacctgttgctgagtctggctggtgtcgatggctgggcgatgcgtctgctgccagccatttctgttctggcactggtagtgagtggcgtgatgtcagtgatgcagggcgcagagctggcgactattcatagctctgtgcagcaggccgcagcgctggtgccggactatggtgcgctgatgtcctggcggattgtgcttttggccgttgccctgtgcttgtggattgcaccacagctaaaaggttatcagcctgcggttccgctactttctgtatcattcattctgcttctggcaggggaattaatcggtcgtggcgtattctatggtttgcatatgaccgtggggatggctgtcgcaagttaatcagtaacaaccggggtttcggccccggttcgcttttatttctgcttcgttaacgtgtcataactggtcatcaagttacgataatcaggaatgtggttagagaacaacgtcgccagtccttcaatatcattacgccagtcgcgatgcagctcgcacgccacgccgaaccatgtcatcaattgcgcaccagcttgcgacatgcgatcccatgccgaatgccgggtaatttcattaaaggtccctgacgcatcagtcacgacaaagacgtcaaacccttcttcaatggctgaaagcgccgggaatgccacgcaaacttcggttaccacaccggcaataattaactgttttttacctgtcgctttgacagcttttacaaaatcttcgttatcccaggcgttaatatttcccgggcgagcaatgtaaggtgcatcggggaattgtgctttcagttctggaactaatgggccgttaggaccggtttcaaaactggtggtaagaatagttggtaagttgaaatacttagccaggtcacccagcgccagcacgttatttttaaacttatcgggttcgatatcccgtacaagggaaagtaaaccagcctggtgatcaacaagcaaaacggcagcatcatttttatcaagacgaacatacggtttggtcatcctcttctcctttcgagagtcagtggtacgtctaaatcggtcagacgtgatgcattgctctgaaagcatagacgggaaatatgagtttgctgtgaccatgaaatttttcgactgaacgaagcgtatgaaatttgtgttagatcaataaaaacaatcagatgagattaatcgtctcttcagcattagcgttatgaatgagtaatataaatcgataataccgccgctgcgatatgcgcgtattttcacccattgacaatgtttttggcggtggcatgatgcgcatgaaatttgaacttcctcacggttttaattcatgtccacgtatacccggcctgtcatgcttttgctgtctggcctgcttttgttgactctggcgattgcggtgttaaatacactcgtgccgctttggctcgcccaggaacacatgtctacatggcaggtaggcgttgtcagctcatcctattttaccggcaaccttgtcggtacattgctgacagggtatgtcattaaacgcattggctttaaccgtagctattatctggcctccttcatttttgccgctggctgtgccggccttggcctgatgattggattctggagttggttggcgtggcgttttgtcgcgggcatcggctgtgccatgatttgggtggttgttgagagtgcgctgatgtgcagtgggacgtcgcgtaaccgcgggcggttgcttgctgcgtatatgatggtttattacgtcggaacgtttttaggccagttactggtcagcaaagtctcaaccgagttgatgagtgtattgccgtgggttacaggtttgacgttggcaggaatcttaccgctgttgtttacgcatgtcctgaatcagcaggctgaaaaccatgattcgacgtcaattacgtcaatgctaaaactccgtcaggcgcggcttggcgtgaatggctgcattatctcaggaatcgtgctgggatctctatatggcctgatgccgctgtacctcaatcacaaaggggtgagcaatgccagcattggtttctggatggcggtactggtcagtgcgggtatcctcgggcaatggccgattggacgtctggcggataagtttggtcgactgctggtgttgcgtgttcaggtctttgtcgtcattctcggcagtattgcgatgcttagccaggcggcgatggccccagcgttattcatcctcggtgccgctggctttacgctatatccggtggcgatggcctgggcttgtgagaaagttgaacatcatcaactggtagcgatgaaccaggccttactgttgagctataccgtgggaagcctgcttggcccgtcatttaccgctatgctaatgcagaatttctccgataatttattatttatcatgatcgccagcgtatcgtttatctatttgctgatgctgcttcgtaacgccggtcatacgccgaaacccgtggctcacgtgtaaatgaattcaagcagagtgtgaacttactgtttcacactctgcttttctgtgcacaaaaaagcggcaacttaataaagttgccgctttacggggaaattagaacatgaccttatgaccgtactgctcaagaatgcctttcacgcgttccatggtctctttcttcggtggtttaacaccatcgagtttgtattcttcacccattgccacccatttgtgtttgcccagttcgtggtaggggaggagctcgattttctcaacgttgcccatatcacgggtaaattcaccaaggcgatgcgctgaatcgtcatcgtcagaccagcctgggacaacaacatagcggatccacaccttcacatttttgttcgccagatatttagcgaactccagcgtgcggtggttggaaactccaaccagattttggtggatctcgtcgttcatctgtttgagatcgagcattaccaggtcggttacttccagcagttcatcaatcaccggatcgtaacgacgaacaaaaccgttggtgtccagacaggtatgaatgccttcttttttgcaggcgcggaaccagtcacgaacaaactcagcttgtaggattgcctcaccgccggatgcggtaacgccgccgccggaagcgttcataaagtggcgataggtcaccacttccttcatcaaatcttcaacggtaacttctttaccgccatgcgtatcccaggtgtcgcggttatgacaatacaggcagcgcatcaggcagccctggaaaaaggtgataaagcgaatacccgggccgtctacggttccacaggattcaaaggagtgaatgcgaccaataactgacattgcggtgtttctccagatgtggcccatctgaggccgtgttggtgcgcagctcgaaggctacgtcgagtctgttttggcagtcaccttaaagtatagatagctgacaaaaaaggctctcgtgctaaaaaaggccccactttcgtggagcctttattgtacgctttttactgtacgatttcagtcaaatctaattacatagattgagtgaaggtacgagtaataacgtcctgctgctgttctttagtcagcgagttgaaacgtactgcgtagccagatacacggatggtcagctgcggatatttttccgggttttccatcgcgtcgagcagcatttcacggttcatcacgttaacgttcaggtgctgaccaccttcgatggatgcttcgtggtggaagtaaccatccatcagaccagccaggttggtcttacgaacttcgtcgtctttacccagtgcgttcggaacgatagagaaggtgtaggagataccatctttagcgtaagcaaacggcagtttagcaacggaagtcagagacgctacagcacctttctggtcacgaccgtgcatcgggttagcacccggtccgaacggcgcgccagcacgacgaccgtctggggtgttaccagttttcttaccatacacaacgttagaagtgatggtcagaacagactgagtcgggatagcgtcacggtaggtgtgcagtttctgaattttcttcatgaaacgttctaccaggtcaacagccaggtcatctacacgcggatcgttgttaccaaactgcgggtattcgccttcgatttcgaagtcgatagccagaccgtcttcgtcacgaatcggtttaactttcgcatatttgattgcagacagggagtcagcagcaacggacagaccagcgataccacacgccatggtgcggataacgtcacggtcgtgcagcgccatcagagaggcttcgtagctgtacttgtcgtgcatgtagtggatgatgttcagtgcagtgatgtactgtttagccagccagtccatgaagtgatccatgcgctccatcacttcatcatagttcaggacatcgcctttgatcggttcagacttcggaccaacctgcattttcagtttttcgtcaacgccgccgttgattgcgtacagcatggttttcgccaggtttgcacgcgcaccgaagaactgcatttgtttaccaacgatcatcgggcttacgcagcaagcaatagcgtagtcatcgttgttgaagtccggacgcatcaggtcatcgttctcatactgcagagaagaggtgtcgatggacactttagcggcgaatttcttgaagttcagcggcagtttttcagaccacagaatggtcatgttcggttccggagacggacccatggtgtacagggtgttcagggaaacggaagctgtttttggtaaccagggtacgaccgtcgaggcccataccaccgatagattcggttgcccagatcgggtcgccagagaacagttcatcgtattccggagtacgcaggaagcgaaccatacgcagtttcatgaccaggtggtcaaccatttcctgcgcttcttgttcggtgatcttgccagctttcaggtcacgttcgatgtacacatccaggaaggtggaggtacgaccgaaggacattgcagcaccgttctgagacttaacagcagccaggtagccgaagtaagtccactggatagcttcctgagcgttggtagccggaccagagatgtcgtagccgtatttcgcagccatttctttcatctgacccagagcgcggtgctgttcagcgatttcttcgcgcagacggatagtctgttccaggtttacgccgttttccagatcagcctgcagagaggtgaactgtgcaagtttgtctttcatcaggtagtcgataccgtacagcgcaacgcgacggtagtcaccgatgatacgaccacggccataagcatctggcagaccggtcagaacaccggatttacggcaacgcaggatgtccggagtgtaaacgtcgaacacgccctggttgtgagttttacggtattcagtgaagatttttttgatcatcgggtccagttcgcggttgtacgctttgcaggaaccttcgatcattttgataccaccgaacgggataagagcacgtttcagcggagcttcagtctgcagaccaacgattttctcaagctgcttgttgatgtaaccagcgtcgtgagaggtgatggtggaagcaacagcggtgtcaaagtcaactggcgcgtgagtgcggttttccagtttaacgccttccattactttgtcccacagggtggtggtcgcttcagtagcgccagccaggaaggactcgtcaccctcgtacggagtgtagtttttctgaatgaagtcacggacgtttacttcattctgccagtcacctttggtaaaaccttcccaggctgtggctaacttttcattaagctcggacatgtaacacctaccttcttaagtggattttttatttactgcgtacttcgacaaccattaatggtgatcgttttcacgcaggtaaatgacccagtatgtcaacccaaccaacaaaccaccgccgataatattaccgatcgtaaccggaatcaggttatcagtgatgaaattcatcacggtcaggtgagaaaaattttccggtgcagaaccgacagcggtccagaattccggagatgcgaagtcgcggattacaatacccatcgggatcataaacatgtttgcgatactgtgctcaaaaccgctggcaacaaacatcgcgaccggcagcaccataatgaacgctttgtccatcaggctgcggccagaataactcatccatactgccagacataccatcaggtttgccaggataccaagacagacggcctcaataaaagtatggtgcactttgtggtcggcggtttgtaggacgtttagtccccattgaccatttgcggtcatatactcgccggaaagccacattaaaagtacaaacagcagtgcgccgaccaggttgccaaaataaacatttagccagtttttcgccaactgaccccaggtgatgcgcccactcgccttggcaacaacaatcaacactgtggaagtaaagagatcggctccgcagacaacacaaagaatcaaccccagagagaagcaaatgccgccaaccagttttgccatgccgaagggcattgtacctgtgccagtggttgctgtgatatagaagacgaatgcgattgagatgaaaacaccggcggtaatcgccagatagaaagtcttaagcggatgtttcgttgctttatagacacctgcctcttcggccactttggccattgcagcaggaagtaaaagatcaaaagggttgtcagctttcacactaactctctctttattaagtcggcgacgagatactaacaaagcattatagatgagaaattgatatagatcatatctcgcctggcttataggcccgtaactcgcatggtttttatgcaaatacggagtaaatatttgattatccaaataaaaataaattttaaaaattaacaaatgagttgaattttttccgcatcctccgctaaaacagttaattaaaagggagcacctggcgaataaagtaacaatatcgatcgtatttattaaatacaaattaccgatatttaaccttataattacaattattttattaatgcaaatatatgtgaagcggggcattaaaaaaacgccccgtaatataactcagacgaatcattaagcctacattgcgtaggctatttgattttattttgcccagaatgctgctttggcgcgttgcagcttttcgtaggccttcaacaacgactgatgtgcagcaaacgcgtgcagatcgctatctactggttgcaagccataaaacgccgcttcgccgctcattgccgcactggcggcttccacggcatctgcgccgtacatgcgaacaaacgcattcagatattgcagcggctggcgatcttcttcctgcgccagtaataacaacgtttgcaggcagcgataataattggcgcgttccgggctgaatactgatgagttaaactccatcgtccattcggtccagaccagagcctgttccagatcgccaccagccagcgccagcatggcttttaattcaccgatacgcagagtgtaccagccgttatccgacccggtcgccagacccaacagttcacgcacgcgggtaaagtcatcaaaaccttcttcatccagttgctcgatgaggttcaggtaatcttccttttcccactcgctacctggtagcgaaagaatcgtttcacgtaaatggctgcccatactgttattcgccagccacagatcttcagccggataaatatcggacatgccaggcacgataatacggcaagcgtagacacccagatgctcgtaatcggcaatataaacttctttatcttcctttttgaagatagccatcagcgtggcgaactcttcttccgtggtgccggagaagctccagtcaacaaacggataatcggcatcctgcttgaacaggtcccaggagattaaaccgctggaatcgataaagtgcgtttcgaggttggtatgttcagcgacttcttcatcatcgaaggttggtggagtaaacacatccagatctttcaggccacgaccttgcagcagctcggtcacggtacgttccagtgcaacgccaaaatcaggatgcgcaccgaatgaggcaaagcaggtaccgttagcaggattgaacagtaccacgcaaatcaccggatactggccgccaagcgaaccgtcataagcgaagatcgggaaaccttccgcttccagcgtttcgatcgcttcaactactgctggataacgtgccagcacgtctgccgggatttccggcaagctgatgctttcagcaataatgcggtttttcacgtaacgttcgaaaacttcggacaacccctgaacgcgtgcttcgttacgggtattgccagcagacataccgttagaaacgtacaagttaccaatgatattcatcggaatataaatggtctgattgtcggactggcgcgtaaacggtagaccgcaaataccacgatcttcgttaccggattgcaggtcaatcagcatactaccggtcagttcattctccggatcgtaaaatgcgcgcagacggtcatcgagcagcccttctggtacatcgtcattttcggtcagtgggaaccatttttcgttgggataatgcacgaatgggccgttggcgatggtttcgcccagccagaagtccgcaaaaaagtagttggttgagagacgctcgaaatattcaccgagggcagaagccagcgccgcttttttggttgcgcctttaccgttggtaaaacacagtgcgcactctttgtcgcgaatatgtacagaccagacgttaggcaccggattcagccaggaggcctcttcaatctgaaaaccgaggtctgaaagtttttgctggaagcgtgcgatggaatcttccagagcggcatctttgccggggataaatgtttgcgtcatgaaaatcactttagtcgtacggaaagcgcacaataatacgggttttatctcaaaggcgctattaccgccgccatgccgatgaactgttggctatgcttttagcggataaaccacgataagagcataaaaatgaaggcgttcgatctccaccgtatggcatttgataaagtgccttttgatttccttggcgaagttgcactacgtagtctttatacctttgtactggtttttttgttcctcaaaatgaccggaagacgcggtgtgcggcagatgtcgctgtttgaagtgttaatcattctgacactgggttcagcggcgggagatgtggcgttttatgatgatgtgccgatggtcccggtacttatcgtctttattactctggcgttgttataccgcctggtaatgtggttgatggcgcacagtgaaaaactggaagatcttctggaaggcaagccggttgtcattattgaagatggcgagctggcctggtcgaaactcaataactccaacatgacggaatttgagttctttatggagctacgattgcgcggtgtagagcagttggggcaggtacgtctggcgattctcgaaaccaacgggcaaatcagtgtttatttctttgaagatgacaaggtgaaaccggggttacttattttacccagtgactgtactcagcgttacaaagtggtgccggagtcggcggactatgcctgcatccgttgcagtgaaatcattcatatgaacgcgggggaaaaacaattatgtccgcgctgtgcaaatccagaatggacgaaggcaagtcgggctaaacgggtgacctgacagccaaaacatcggttttttgaaaataatccgagagattcttttgtgtgacgcgtgcctcatttttgccctcaacggttttactcattgcgatgcgtgtcactgaatgataaaaccgatagccacaggaataatgtattgcctgtggtcgcaattgattgaccgcgggttaatggcaacgcaacgtggtgaggggaaatggctcaaatcttcaattttagttctggtccggcaatgctaccggcagaggtgcttaaacaggctcaacaggaactgcgcgactggaacggtcttggtacgtcggtgatggaagtgagtcaccgtggcaaagagttcattcaggttgcagaggaagccgagaaggattttcgcgatcttcttaacgtcccctccaactacaaggtattgttctgccatggcggtggtcgcggtcaatttgctgctgtaccgctgaatattcttggtgataaaaccactgcagattatgttgatgcgggttactgggcagcaagtgctatcaaagaagcgaaaaaatactgcacaccaaatgtgtttgatgcgaaagtgaccgttgatggtcttcgcgcagttaagccaatgagtgaatggcaactctctgataatgctgcttatatgcattactgcccgaacgaaaccattgacggtatcgctatcgatgaaacaccagacttcggtaaagacgtggtggtcgccgctgacttctcttcaaccattctttcccgtccgattgatgtcagccgttatggtgtaatttacgctggcgcgcagaaaaatatcggcccggctggcctgacaatcgtcatcgttcgtgaagatttgctgggcaaagcgaatatcgcctgcccatcgattctggattactccatcctcaacgataacgattccatgttcaacacgccgccgacatttgcctggtacttatctggcctggtcttcaaatggctgaaagcgaacggcggtgtggctgcaatggataagatcaatcagcaaaaagcagaactgctgtatggggtgattgataacagcgatttctaccgcaatgatgtggcgaaagctaaccgttcgcggatgaacgtgccgttccagttggcggatagcgcgcttgataaattgttcctcgaagagtctttcgctgcgggcttacatgcgctgaaaggtcaccgagtggtcggcggaatgcgtgcgtctatttataacgccatgccgctggaaggtgttaaagcactgacagacttcatggttgagttcgaacgtcgtcacggctaatgtcgaaattttgcataatccccacagccagcctgtggggtttttatttctgttgtagagagttgagttcatggaatccctaacgttacaacccatcgctcgtgtcgatggcactattaatctgcccggttccaagagcgtttctaaccgcgctttattgctggcggcattagcacacggcaaaacagtattaaccaatctgctggatagcgatgacgtgcgccatatgctgaatgcattaacagcgttaggggtaagctatacgctttcagccgatcgtacgcgttgcgaaattatcggtaacggtggtccattacacgcagaaagtgcccgggagttgttcctcggtaacgccggaacggcaatgcgtccgctggcggcagcactttgcctgggtagcaatgatattgtactgaccggtgaaccgcgaatgaaagaacgcccgattggtcatctggtggatgcgctgcgccagggcggggcgaagatcacttacctggaacaagaaaattatccgccattgcgtttacagggcggctttactggcggcaacgttgatgttgatggctccgtttccagccagttcctcaccgcactgttaatgactgcgcctcttgcgccggaagatacggtgattcgtattaaaggcgatctggtttctaaaccttatatcgatatcaccctcaatctgatgaagacgtttggtgttgaaattgaaaatcagcactatcaacaatttgtcgtaaaaggggggcagtcttaccagtctccgggcacttatttggttgaaggcgatgcatcttcggcttcttatttcctggcagcagcagcaatcagaggcggcactgtaaaagtgaccggcattggacgcaacagtatgcagggtgatattcgctttgctgatgttctggaaaaaatgggcgcgaccatttgctggggcgatgattatatttcctgcacgcgtggtgaactgaacgccattgatatggatatgaaccatattcccgatgcggcgatgaccattgccaccgcggcgttatttgcaaaaggcaccaccacgctgcgcaatatctataactggcgtgttaaagagtccgatcgcctgtttgcgatggcaacagaactgcgtaaagtcggtgcggaagtcgaagaggggcatgatttcattcgcattacgccaccggaaaaactgaaatttgctgagatcgccacttataatgatcaccggatggcgatgtgtttctcgctggtcgcattatcagatacgcctgtgacgattcttgatccaaaatgtaccgctaaaacttttccagactatttcgagcaattggcgcggataagtcaacccggctgaatgaataacgggcgataacatagacaatcctttcttttcaaagacgtcggcacattgccggcgttttttttcggaccttgtggggtatttttattaatggtagcgttaattatcaatgtaacttgttgatacataatgtttatatataattaatcaacggatgattcacatgaagaatactaaattattgctggcgattgcgacctctgcagccttactgacaggatgtcagaatacgcacggtattaataccgatttggctatcagctcaggtctgaatgcttataaagccgcaacattaagcgatgctgatgctaaagcaatcgccaatcagggctgtgtcgaaatggacagcggcaataaagtggcaagcaaatccagcaagtacgggaaacgtctggcaaaaatcgccaaagcattgggtaacaatattaatggcacgccagtcaactataaggtttatatgaccagcgacgtcaacgcatgggcgatggcgaacggttgtgttcgtgtctacagtggcctgatggacatgatgaacgacaacgaaattgaaggcgttctgggccatgaactgggccacgtcgcgttgggtcactcgctggctgaaatgaaagcttcttatgcgatcgtggccgcacgcgatgccatttcagctaccagcggtgtggcttcccagctttcccgttcacaattaggtgatatcgcagaaggcgctatcaatgctaaatactcccgtgataaagaatccgaagcagatgatttctcttttgatctgttgaagaaacgtggcatcagtacccaggggctggttggtagctttgaaaaactggccagcctggatggcggtcgcacccagtccatgtttgattctcacccaccatcaacagagcgtgcgcaacacatccgtgatcgtatcgcctctggtaagtaaatcattgtcatctttcgggctggtcttctgccagcccgctataattgcgcaataaatccccatctgaatacagacaaaactggtttttgcacacaacgttaacgatttgtggcgtcggcgcgtataatgcgcgcggttatgttaacggtacgcctgttttaaggagataaagatgacggcaattgccccggttattaccattgatggcccaagcggtgcagggaaaggcaccttgtgtaaggctatggcggaagcgttgcaatggcatctgctggattcgggtgcaatttatcgcgtactggcactagcggcattacatcaccatgttgatgttgcatcggaagatgcgctggtgccgctggcatcccatctggatgtacgttttgtgtcaaccaacggtaatctggaagtgatcctcgaaggggaagatgtcagcggcgaaattcgtactcaggaagtggcgaatgctgcttcacaagtcgcggcattcccacgcgttcgtgaagcattattgcgtcgccaacgcgcgtttcgcgaattaccaggcctgattgccgatggccgcgacatgggaacggtggtattccctgatgcgccagtgaaaattttccttgacgcctcctcggaagaacgtgcgcatcgccgcatgctacagttgcaggagaagggctttagtgttaactttgagcgccttttggccgagatcaaagaacgcgacgaccgcgatcgtaaccgagcggtagcgccactggttccggcagccgatgctttagtgttggattccaccaccttaagcattgagcaagtgattgaaaaagcgctacaatacgcgcgccagaaattggctctcgcataagcgaccgaatttgcagtacccccgttgcaatggaatgacagcgggtatgttaaacaaccccatccggcatggagccaggtggacgttaaatataaacctgaagattaaacatgactgaatcttttgctcaactctttgaagagtccttaaaagaaatcgaaacccgcccgggttctatcgttcgtggcgttgttgttgctatcgacaaagacgtagtactggttgacgctggtctgaaatctgagtccgccatcccggctgagcagttcaaaaacgcccagggcgagctggaaatccaggtaggtgacgaagttgacgttgctctggacgcagtagaagacggcttcggtgaaactctgctgtcccgtgagaaagctaaacgtcacgaagcctggatcacgctggaaaaagcttacgaagatgctgaaactgttaccggtgttatcaacggcaaagttaagggcggcttcactgttgagctgaacggtattcgtgcgttcctgccaggttctctggtagacgttcgtccggtgcgtgacactctgcacctggaaggcaaagagcttgaattcaaagtaatcaagctggatcagaagcgcaacaacgttgttgtttctcgtcgtgccgttatcgaatccgaaaacagcgcagagcgcgatcagctgctggaaaacctgcaggaaggcatggaagttaaaggtatcgttaagaacctcactgactacggtgcattcgttgatctgggcggcgttgacggcctgctgcacatcactgacatggcctggaaacgcgttaagcatccgagcgaaatcgtcaacgtgggcgacgaaatcactgttaaagtgctgaagttcgaccgcgaacgtacccgtgtatccctgggcctgaaacagctgggcgaagatccgtgggtagctatcgctaaacgttatccggaaggtaccaaactgactggtcgcgtgaccaacctgaccgactacggttgcttcgttgaaatcgaagaaggcgttgaaggcctggtacacgtttccgaaatggattggaccaacaaaaacatccacccgtccaaagttgttaacgttggcgatgtagtggaagttatggttctggatatcgacgaagaacgtcgtcgtatctccctgggtctgaaacagtgcaaagctaacccgtggcagcagttcgcggaaacccacaacaagggcgaccgtgttgaaggtaaaatcaagtctatcactgacttcggtatcttcatcggcctggacggcggcatcgacggcctggttcacctgtctgacatctcctggaacgttgcaggcgaagaagcagttcgtgaatacaaaaaaggcgacgaaatcgctgcagttgttctgcaggttgacgcagaacgtgaacgtatctccctgggcgttaaacagctcgcagaagatccgttcaacaactgggttgctctgaacaagaaaggcgctatcgtaaccggtaaagtaactgcagttgacgctaaaggcgcaaccgtagaactggctgacggcgttgaaggttacctgcgtgcttctgaagcatcccgtgaccgcgttgaagacgctaccctggttctgagcgttggcgacgaagttgaagctaaattcaccggcgttgatcgtaaaaaccgcgcaatcagcctgtctgttcgtgcgaaagacgaagctgacgagaaagatgcaatcgcaactgttaacaaacaggaagatgcaaacttctccaacaacgcaatggctgaagctttcaaagcagctaaaggcgagtaattctctgactcttcgggatttttattccgaagtttgttgagtttacttgacagattgcaggtttcgtcctgtaatcaagcactaagggcggctacggccgcccttaatcaatgcagcaacagcagccgcttaatttgcctttaaggaaccggaggaatcatgaccaagtcagaattgatagaaagacttgccacccagcaatcgcacattcccgccaagacggttgaagatgcagtaaaagagatgctggagcatatggcctcgactcttgcgcagggcgagcgtattgaaatccgcggtttcggcagtttctctttgcactaccgcgcaccacgtaccggacgtaatccgaagactggcgataaagtagaactggaaggaaaatacgttcctcactttaaaccaggtaaagaactgcgcgatcgcgccaatatttacggttaagtttttactcaaacttgaacgcgagaaaagcacctgtcgggtgcttttttcatttctctaatctggaactggaagctgcctcgcagagttttgagcagttttcaccctatcgttaaattcttctgaacgtgcctcggggaacgcaaaactcccaccagacaaccgttcaacaaagttgcacactttctataaacagggagggtgcatgaaaataacgacagtcggcgtatgcataatttgcggaatttttccgttgctgattttgccccaattgcctgggacagtaacccttgcgtttctgactctcttcgcctgtgtactggcatttatccctgttaaaaccgtccgttatatcgtgctgacgttgctgtttttcgtttggggcatattagcagcaaagcaaattttgtgggcaggagaaaccttaactggcgcgacgcaggatgcaattgttgagatcattgctactgacggcatgaccactcattacggtcaaattactcatctacaaggtcgacgtatattccctgcgccaggcctcgtactgtatggcgaatatcttccgcaagcggtttgtgccggacaagtatggtcaatgaaactcaaagttcgtgcagttcatggtcaacttaatgatggcggctttgatagccagcgttatgccattgcccagcatcaaccgctcaccggccgttttctgcaggcaagtgtcattgaaccgaattgtagcctgcgtgcacagtatctggcgtcactacaaacaacgctgcaaccctatatgtggaacgcggttattcttggattaggtatgggggaacggttatccgtctccaaagaaatcaaaaatatcatgcgtgatactggaacggcgcatttaatggcgatatcaggattgcacatcgcttttgcggcgttgctggctgcaggactcattcgcggtgggcaagtttttctgcctgggtgctggatccactggcaaatgccattaattggtggaatctgctgtgctgctttttatgcctggcttacgggaatgcaacctcctgcattgcgtaccgtggtggcgcttgccatttggggaatgcttaagttaagtggacgacaatggagtggctgggatgtatggatatgttgtctggcggcaattttgctgatggatcctgttgccattctctcgcaaagtttatggctatctgccgctgcggtcgcggcactgattttttggtatcagtggtttccctgtccggagtggcagctgccgccggtattgcgcgcggttgtttccctcatccatctgcaactgggaatcaccctcctgcttatgcccgtgcaaattgtcatatttcatggcattagtctgacctcgtttattgcaaatctttttgcaattcccctggtgacatttatcacggttccgttgattctcgccgcgatggttgtgcatttaagcgggccgtttattctggaacaagggttatggtttcttgccgaccggtctttggctttacttttctgggggttaaagagtttgccggaagggtggatcaacattgctgaacgttggcaatggctaacattttccccatggttcttactggtggtatggcgattaaacgcctggcgaacgttgccagcaatgtgtgtggctgtaggcttgctgatgtgcttgccgctgtggcaaaaacctcgacctgacgagtggcaagtgtacatgcttgatgtcgggcaagggctggcaatggtcattgcgcgaaacggcaaagcgattctctatgacacgggactggcctggcccgaaggggatagtgggcaacaactgattatcccctggctccactggcataatcttgaaccggaaggcgttattttgagtcatgaacatctggatcaccggggagggctggactcaatattgcacacatggccgatgttatggatccgaagtccgttaaactgggaacatcatcagccctgtgtgcgtggcgaagcgtggcaatggcaaggattgcgtttcagcgcgcactggcctttacaaggtagcaacgataaaggaaataaccattcctgtgtggttaagattgatgacgggacgaatagcattcttctaaccggtgatattgaagcccccgctgaacaaaagatgctaagccgttactggcagcaaatgcaggcaacattacttcaggtacctcaccatggcagtaatacctcatcatcgttgccattaattcagcgagtgaatggaaaagtggcactcgcatcggcatcgcgctataacgcatggcgactgccctcaagcaaagttaaacatcgctatcaacaacagggttataagtggcttgatactccacatcagggtcaaataacggtcaatttttcagcgcaaggctggcggattagcagcctcagagagcaaattttacctcgttggtatcatcagtggtttggcgtgccagtggataacgggtagaatatgcggctatttcaacaaatgctggttttttgaatgcataacgacaaagatctctctacgtggcagacgttccgccgactgtggccaaccattgcgccttttaaagcgggtctgatcgtggcgggcgtagcgttaatcctcaacgcagccagcgataccttcatgttatcgctccttaagccacttcttgatgatggctttggtaaaacagatcgctccgtgctgatgtggatgccgctggtggtgatcgggctgatgattttacgtggtatcaccagctatatctccagctactgtatctcctgggtatcaggaaaggtggtaatgactatgcgtcgccgcctgtttggtcacatgatgggaatgccggtttcattctttgacaaacagtcaacgggtacgctgttgtcacgtatcacctacgattccgaacaggtcgcttcttcttcttccggcgcactgattactgttgtgcgtgaaggtgcgtcgatcatcggcctgttcatcatgatgttctattacagttggcaactgtcgatcattttgattgtgctggcaccgattgtttcgattgcgattcgcgttgtatcgaagcgttttcgcaacatcagtaaaaacatgcagaacaccatggggcaggtgaccaccagcgccgaacaaatgctgaaaggccataaagaagtattgattttcggtggtcaggaagtggaaacgaaacgcttcgataaagtcagcaaccgaatgcgtcttcaggggatgaaaatggtttcagcctcttctatctctgatccgatcattcagctgatcgcctctttggcgctggcgtttgttctgtatgcggcaagcttcccaagtgtcatggatagcctgactgccggtacgattaccgttgttttctcttcaatgattgcacttatgcgtccgctgaaatcgctgaccaacgttaacgcccagttccagcgtggtatggcggcttgtcagacgctgtttaccattctggacagtgagcaggagaaagacgaaggtaagcgcgtgatcgagcgtgcgactggcgacgtggaatttcgcaatgtcacctttacttatccaggacgtgacgtgcccgcattgcgtaacatcaacctgaaaattccggcagggaagacggttgctctggttggacgatctggttcaggtaaatcaaccatcgccagcctaatcacacgtttttacgatattgatgaaggcgaaatcctgatggatggtcacgatctgcgcgagtataccctggcgtcgttacgtaaccaggttgctctggtgtcgcagaatgtccatctgtttaacgatacggttgccaacaacattgcttacgcaaggactgaacagtacagccgtgagcaaattgaagaagctgcgcgtatggcctacgccatggacttcatcaataagatggataacggtctcgatacagtcattggtgaaaacggcgtgctgctctctggcggtcagcgtcagcgtattgctatcgctcgagccttgttgcgtgatagcccgatactgattctggacgaagctacctcggcgttggataccgaatccgaacgtgcgattcaggcggcactggatgagttgcagaaaaaccgtacctctctggtgattgcccaccgcttgtctaccattgaaaaggcagacgaaatcgtggttgtcgaggatggtgtcattgtggaacgcggtacgcataacgatttgcttgagcaccgtggcgtttacgcgcaacttcacaaaatgcagtttggccaatgatcgaaaaaatctggtctggtgaatcccctttatggtggctattgctgccactctcctggttgtatggcctggtgagtggcgcgatccgtctttgctataaactaaaactgaagcgcgcctggcgtgcccccgtaccggttgtcgtggttggtaatctcaccgcaggcggcaacggaaaaaccccggtcgttgtctggctggtggaacagctgcaacagcgcggtattcgcgtgggggtcagtatcgcggggatatggtggtaaggctgaatcttatccgctgttattgtcggcagataccaccacagcacaggcgggtgatgaacctgtgttgatttatcaacgcactggcgcgcctgttgcggtttctcccgtgcgttctgacgcggtaaaagccattctggcgcaacaccctgatgtgcagatcatcgtaaccgacgatggtttacagcattatcgtctggcgcgtgatgtggaaattgtcgttattgatggtgtgcgtcgctttggcaatggctggtggttgccggcggggccaatgcgtgagcgagcggggcgcttaaagtcggttgatgcggtaatcgtcaacggcggtgtcccccgcagcggtgaaatccccatgcatctgctgccgggtcaggcggtgaatttacgtaccggtacgcgttgtgacgttgctcagcttgaacatgtggtggcgattgcggggattgggcatccgccgcgcttttttgccacgctgaagatgtgcggcgtacaaccggaaaaatgtgtaccgctggccgatcatcagtctttgaatcatgcggatgtcagcgcgttggtaagcgccggacaaacgctggtaatgactgaaaaagatgcggtgaaatgccgggcctttgcagaagaaaattggtggtatttgcctgtagacgcacagctttcaggtgatgaaccagcgaaactgcttgcgcaactaacctcgctggcttctggccactagttacgccgcggcagcgttcgattgatggagtcatgaatgtcgctgccgcacctctcccttgctgatgcgcgtaatcttcaccttgccgcgcaaggcctgttaaacaaaccccgccgtcgagcgtcgttggaggatattccggcaacgatctcccgcatgtccttgctgcaaatcgataccatcaatattgttgtccgtagcccatatctggtgcttttcagccgtctgggagattatcctgcgcagtggctggatgagtctctggcgcgtggagaattaatggaatactgggcgcatgaagcctgctttatgccgcgtagcgattttcgtcttattcgccaccgcatgctggcacctgaaaaaatgggctggaaatataaagacgcctggatgcaggaacatgcggcggaaattgcactgttaattcagcatattcatgataaggggccggtacgttcagccgattttgagcatcctcgtaaaggggcgagcggctggtgggagtggaagccgcataaacgacatctggaaggtttatttactgccggaaaggtgatggtgattgaacggcgcaacttccagcgcgtttatgatttaactcaccgtgtcatgcctgagtggaatgatgagcgcgatctcgtttcgcaagcagaagcagaaatcatcatgctggataacagtgcgcgtagcctgggaatatttcgcgaacagtggctggcagattactaccggctaaaacgtccggcactggcggcgtggcgtgaagcgagggctgaacagcagcaaatcattgctgtgcatgttgaaaaattgggtaatctttggctgcatgctgatttgctgccgctactcgagcgtgcgctcgccggaaagctcactgcaacgcacagcgcggtactttcgccttttgatcctgttgtctgggatcgcaaacgcgcggagcagctttttgattttagctaccggctggagtgctatatcccagcgccgaaacgccagtatggctattttgttctgccgttattacatcgtgggcaattagttgggcgaatggatgccaaaatgcatcgccagacaggcatccttgaagttatctctctgtggttacaggaaggcattaaaccgacgacaacgctgcaaaaagggttacgtcaggcgattactgatttcgctaactggcagcaggcaacgcgggtgacattaggacgctgctcgcaaggcctctttactgattgtcgcgccggctgggaaatagaccccgtcgcataaatgattatgataagatttatgcattcataacccgatccatctggaggaactatggatcatcgtctgcttgaaatcattgcctgcccggtttgcaacggaaaactttggtataaccaggaaaaacaagagcttatttgcaaactggacaacctggctttcccgctgcgcgatggcattccagtgttgctggaaacggaagcccgcgtgttgactgctgatgagagtaaatcatgagttttgtggtcattattcccgcgcgttacgcgtccacgcgtctgcccggtaaaccattggttgatattaacggcaaacccatgattgttcatgttcttgaacgcgcgcgcgaatcaggtgccgagcgcatcatcgtggcaaccgatcatgaggatgttgcccgcgctgttgaagtcgctggcggcgaagtatgtatgacgcgcgccgatcatcagtcaggtacagaacgtctggcggaagttgtcgaaaaatgcgcattcagcgacgacacggtgatcgttaatgtgcagggtgatgaaccgatgatccctgcgacaatcattcgtcaggttgctgataacctcgctcagcgtcaggtgggtatggcgactctggcggtgccaatccacaatgcggaagaagcgtttaacccgaatgcggtgaaagtggttctcgacgccgaagggtacgcactgtacttctctcgcgccaccattccgtgggatcgtgatcgttttgcaaaagaccttgaaaccgtaggcgataacttcctgcgtcatcttggtatttatggctaccgagcaggctttatccgtcgttatgttacctggcagccaagtccgttagaacatatcgaaatgttagagcagcttcgtgttctgtggtacggcgaaaaaatccacgttgctgtcgcccaggaagttcctggcacaggtgtggatacccctgaagatctcaagcgcgttcgcgccgaaatgcgctaatttcacttcacgacactccagccaattttgggaggagtgtcgtaccgttacgattttcctcaatttttcttttcaacaattgatctcattcaggtgacatcttttatattggcgctcattatgaaagcagtagcttttatgagggtaatctgaatggaacagctgcgtgccgaattaagccatttactgggcgaaaaactcagtcgtattgagtgcgtcaatgaaaaagcggatacggcgttgtgggctttgtatgacagccagggaaacccaatgccgttaatggcaagaagctttagtgcgcccggaaaagcccgacaactggcatggaaaaccaccatgctggcaagaagtgggactgtccgtatgccgactatttatggtgtgatgacgcacgaagaacaccccggccccgatgtcctgctactggagcgaatgcgtggtgtttcggtggaggcaccagcccgaacaccagaacgctgggaacaactcaaagatcaaatcgttgaagccttactggcctggcaccgtcaggacagtcgtggttgcgtcggcgcggtcgacaatactcaggaaaatttctggccctcatggtaccggcaacatgttgaagtgctatggaccacgctcaatcagttcaataacaccggtctaacgatgcaggataagcggatcctgtttcgcactcgcgaatgtctcccggcattatttgaaggctttaacgacaattgtgtactgattcacggtaacttctgtttacgtagcatgctgaaagattcgcgcagcgatcagttactggcgatggtcggaccgggactaatgctttgggcaccgcgagaatacgaactgttccgactaatggataattctctggcggaagatttgctctggagttatctgcaacgcgcgccagtggcggagtcgttcatctggcggcgttggttgtatgtgttatgggatgaagttgcgcaactggttaataccggacgatttagtcggcgcaacttcgatctggcatcaaaatcactcttgccgtggctcgcctgacgaaccttttagccactgccagatgcggccaagcgtttcatagccaacacgatcgctatgcatcaaccagaccggagaagggattgcccgttcccacggattaagcggcgagtcgatggccaactgattcgccggggctggtagcggatttaacccttcctgctgaaaaaagatcatcgcccgcggcagatgtgatgcggaggtcaccagcaggaaaggtgcgtcaccaatcgcctgtttcactgctgcagcttcttcttcggtatcttttggcaaatccagggtgataatttgctcgcgcggcacgcccagcgattgcgcaactctggcacctacttccgctgtgctcaccgtattggttttagctacgcctcccgtaaagatcagttttgatcccggattttcgcgccataagcgaataccttcattcaggcgtggcagactgttattgattaaattagagctcggcgcccactgcgggttccaggtataaccacctccgagcaccacgatatagtccactttttgcgaattattccatgtcggataagtgctttcgatgggacgcaacaggcggtcggctatcggttgcaaactcaataacaagagcgccagccacccaatgctaataaaaatcttcccggttttttgaaaacggctaaaccacagcagcgccaggccagcgccaataatcaacaacatcagcggaagtggcagcaacatattgccaatcacttttttcagtgtaaaaagcatcctttctggttccttttttgaccatatagcaagggatcgccagcgatattacaccagacgggttcattctcgccgtggctgtgacaaaatagcgtctttatcagaaaacgtcttagccaaccggtggagaaagcaatgcaggatcgcaattttgatgatattgcggaaaagttttcccgtaacatttacggcaccaccaaagggcagcttcgacaggctattctgtggcaggatctcgatcgcgtgctggcggaaatgggcccgcaaaaactgcgtgtgctggatgctggcggcggagaagggcagaccgcaatcaaaatggccgagcgcgggcatcaggtcattttatgcgatctttctgcgcagatgatcgaccgcgcaaaacaggcggcagaagcaaaaggtgtgagcgacaacatgcaatttatacattgcgccgctcaggatgttgcttcgcatttggaaacgcccgttgatctgatattgttccatgcggtgctcgagtgggtggccgatccccgcagcgtattacagaccctgtggtcagtgttgcgtccaggcggcgtattgtcgttaatgttctacaatgcgcatggtttgttgatgcataacatggtcgccgggaattttgattacgtgcaggcgggaatgccgaaaaagaaaaaacggacgctttcgccagattatccacgcgacccggcgcaggtttatctgtggctggaagaagctggttggcaaattctgggtaagacaggcgttcgcgtgtttcatgattatctgcgcgagaagcaccagcagcgcgactgctatgaagcattacttgaattagaaacgcgttattgccgtcaggaaccgtatattaccttggggcgttatattcatgtcaccgcgcgcaaaccgcagagcaaggataaagtatgagtgaattttcccagacagtccccgaactggttgcctgggccagaaaaaatgacttctccatctcgctgccggtagaccgactctcttttctgctggcggttgccacgctgaacggcgagcgtctggatggtgagatgagtgaaggcgagctggtggatgcattccgccatgtgagtgatgcgtttgagcaaaccagcgaaaccatcggcgtgcgcgccaacaacgcgatcaacgacatggtgcgtcaacgtctgctgaaccgctttaccagcgagcaggcggaagggaacgcaatttaccgtctgacgccgctcggcatcggcatcactgactattacattcgtcagcgcgagttttctacgctgcgcctttctatgcaattgtcgattgtggcgggtgagctcaagcgcgcagcagatgccgccgaagagggcggtgatgaatttcactggcaccgtaatgtttatgcgccactgaaatattcggtagcagaaattttcgacagtatcgacctgacgcaacgtctgatggatgaacagcagcagcaggtgaaggatgatatcgcccagttgttgaacaaagactggcgggcggcgatttccagctgtgaattgttgctttcagaaacttccggaacgctgcgtgaattgcaggatacgctggaagcggcaggcgataaattgcaggccaacctgttacgcattcaggatgcgacgatgacccatgacgacctgcattttgtcgatcgtctggtgttcgatcttcagagcaaactcgaccgtattatcagttggggccagcaatccatcgacttgtggattggctacgaccgccacgtacacaaatttattcgtactgcgatcgatatggataaaaaccgcgtctttgctcagcggttacgtcagtcggtacaaacctattttgatgagccgtgggcgctaacttatgccaatgccgatcgtctgctggatatgcgtgacgaagagatggtactgcgcgatgaagaagtgactggggaacttcctgaggatctggagtacgaagagtttaacgagatccgcgaacagctggcggcgatcatcgaagaacaacttgccgtgtacaaaaccagacaagtgccgttggatcttggtctggtggtacgcgaatatctgtcacagtatccgcgtgcacgtcactttgacgttgcgcgcattgttattgatcaggcggtacgtcttggcgtagcgcaagcagatttcaccggactgccagcgaaatggcagccgattaatgattacggagccaaggtacaggcgcatgtcatcgacaaatattgaacaagtgatgccggttaagctggcgcaggcgctggcgaatccgttatttccggcgctggatagcgccttacgttcaggccgtcatattggcctcgacgaactggataatcatgcattcctgatggattttcaggaatatctggaagagttttacgcgcgttataacgttgagcttattcgtgcaccggaagggttcttctatctacgcccacgttccaccacgctgatccctcgttccgtcttgtcggaactggatatgatggtcgggaaaatcctctgttatctctatctcagcccggaacggctggcgaatgaggggatttttactcaacaggaactgtacgacgaactgctcaccctggccgatgaagcgaaactgctgaaactggtgaacaaccgttcaaccggttcagacgttgaccgtcagaagttgcaggaaaaagtacgttcttcgctcaaccgtctgcgtcgtttaggcatggtgtggtttatgggccacgacagcagcaagttccgcattaccgaatcggtgttccgcttcggagccgatgtgcgtgctggcgacgatccccgtgaagcacagcgtcgcctgattcgtgatggtgaagcaatgccgattgaaaatcatctgcaactcaacgatgaaaccgaagagagtcagccagatagcggagaggaagaataatgattgaacgcggtaaatttcgctcactgacgctgattaactggaacggcttttttgcccgaacttttgaccttgacgagctggtcacgacgctttctggcggtaacggggcgggtaaatccaccaccatggcggcgttcgttacggcgcttatccccgacctgaccctgctgcatttccgtaacactacggaagccggggccaccagcggttcgcgcgataaaggtctgcacggtaagctgaaagcgggtgtctgttattcgatgctcgacaccattaactcgcgccaccagcgtgtagtggtcggtgtgcgtctgcaacaggttgccggacgcgatcgtaaagtggatatcaaaccatttgccattcagggcctgccgatgtcggtgcagccgacacaactggtgaccgaaactctgaacgaacgccaggcgcgcgtgctgccgcttaacgagctgaaagacaagctcgaggcgatggaaggcgtgcagtttaaacagttcaactccattaccgattaccactcgctgatgttcgagctgggcatcatcgcgcgtcgtctgcgctcagcgtctgaccgtagtaaattctatcgtctgatcgaagcctcgctgtatggcgggatctccagcgccattactcgttctctgcgcgactacctgttgccggaaaacagtggggtgcggaaagcgttccaggacatggaagcggcgctgcgtgaaaaccgcatgacgctggaagcgattcgtgtcacccagtcggaccgtgacctgtttaagcatctgatcagcgaagccaccaactacgtggcggcggactacatgcgtcacgccaacgagcgccgtgttcatctcgataaggccctggagtttcgtcgcgagctacatacttcgcgtcagcaactggcggctgagcagtacaaacacgtcgacatggcgcgagagctggctgagcacaacggtgccgaaggcgatctggaagcggattatcaggcggccagcgatcacctgaacctggtgcaaaccgcactgcgtcagcaggagaagatcgaacgctacgaagcggatctcgatgagctgcagatccgtctggaagagcaaaacgaagtggtggcagaagccatcgaacgccaggaagagaacgaggctcgtgcggaagctgccgaactggaagtggacgagctgaaaagccagcttgctgactaccagcaggcgctggacgtccagcaaacgcgcgcgatccagtataaccaggcgattgctgcgcttaatcgtgccaaagaactgtgccatctgccggacttaaccgccgacagcgctgccgaatggctggaaaccttccaggcgaaagagctggaagcgaccgaaaaaatgctctctcttgagcagaaaatgagcatggcgcaaaccgcgcacagccagtttgagcaggcttatcagctggtggtggcaatcaacggcccgctggcgcgtaacgaggcgtgggatgtcgctcgcgaactattgcgcgaaggggtcgatcagcgtcacctggcagagcaggttcagccgttgcggatgcgcttaagcgaactggaacagcgtctgcgtgagcagcaagaagctgagcgtctgctggcagatttctgcaaacgtcagggcaagaattttgatattgatgaactggaagctctgcatcaggagctggaagcacgcattgcctctctttccgatagcgtctctaacgcccgagaagagcggatggcactgcgccaggagcaggaacagctgcagtctcgcattcagagtttgatgcagcgtgcgccggtttggctggcagcgcaaaacagtctcaaccagttgagcgaacagtgcggcgaagagttcacctccagccaggatgtcaccgaatttctgcaacagttgctggagcgcgagcgcgaggcaattgttgaacgcgatgaagtaggcgcgcgcaaaaacgccgtcgatgaagagatcgaacgtttaagccagccaggtggttctgaagatcagcgtctgaacgcgctggcggagcgttttggtggtgtgctgctgtcagaaatttatgacgacgttagcctggaagatgcgccgtacttctcagcactgtatggcccgtcacgccacgccatcgtggtgccagatctgtcacaggtaaccgaacacctggaaggcttgaccgattgcccggaagatctctatttgatcgaaggggatccgcagtcattcgatgacagcgtgttcagcgttgatgagctggaaaaagcggtggtggtgaaaatcgccgatcgtcagtggcgttattcacgtttcccggaagtgccgctgtttggtcgtgctgcgcgtgaaagccgtattgaaagcctccatgccgagcgggaagtgctttccgaacgcttcgccacgctctcctttgatgtacagaaaacccagcgtctgcatcaggcgttcagccgctttatcggcagtcatctggcggtggcgtttgagtctgacccggaagcagaaatccgtcaactgaacagccgtcgcgtcgaactggaacgggcgttgagtaatcatgaaaatgataaccagcagcagcgtattcagtttgagcaggcgaaagagggcgttacggcgctgaaccgcattctgccgcgtctcaacctgttggctgatgacagcctggcggatcgcgtcgatgaaatccgcgaacgtctggatgaagcccaggaagccgcgcgttttgttcagcagtttggcaatcaactggcgaaactggaaccgatcgtttcggtattgcagagcgacccggaacagttcgaacagttaaaagaagattacgcgtactctcagcagatgcagcgcgatgcccgtcagcaggcgtttgccctgacggaagtggtgcagcgtcgtgcgcactttagctactctgactcggcagaaatgcttagcggtaacagcgatctcaacgaaaaactgcgtgaacgtctggaacaggcggaagcggagcgtacccgcgctcgtgaagcgttgcgcggacacgcagcgcagttgaatcagtacaaccaggtgctggcttcgctgaaaagttcgtatgacaccaaaaaagagctacttaacgatctgcaacgtgaattgcaggatatcggcgtgcgtgctgatagcggggcagaagagcgggcacgtattcgccgtgacgagttgcacgcgcaactgagcaataaccgttcacgacgcaatcaactggaaaaagcgcttacattctgcgaagcggagatggacaacctgacccgtaaactgcgcaagctggagcgggattactttgagatgcgcgagcaggtagtgaccgccaaagcgggctggtgtgcggtgatgcgcatggtgaaagataatggcgttgagcgtcgcttacaccgtcgtgagctggcttatctctccgctgatgatttgcgttccatgtcggataaggcgttaggtgcgctgcgtctggcggtggcagataacgaacatctgcgcgacgtgctgcggatgtcggaagatccaaaacgtccggaacgtaaaattcagttcttcgtggcggtttatcagcatctgcgtgaacgtattcgtcaggatattattcgtaccgatgatccggtggaagctatcgaacagatggagatcgagcttagccgtctgaccgaagaattaacctcccgtgaacagaaactggcgatcagttcccgcagcgtggcgaacatcattcgcaaaaccattcagcgcgagcagaaccgtatccgtatgctcaaccaggggttgcagaacgtatcgtttggccaggtgaacagcgtacgtctgaacgtgaacgtacgtgaaacgcacgccatgctgctggatgtgctctctgaacagcacgagcagcatcaggatctgtttaacagcaaccgcctgaccttctcagaagcgctggcgaaactgtatcaacgtcttaacccgcagattgatatggggcagcgcacgccgcagaccatcggtgaagaactgctggattaccgcaactatctggaaatggaagttgaggttaaccgtggttccgatggctggttgcgtgcagagtctggtgcattgtcgaccggtgaggcgattggtaccggtatgtcgattctggtgatggtggtacaaagctgggaagatgaatctcgccgcctgcgcggtaaagatatctctccttgccgcctgctgttcctcgatgaagcagcgcgactggatgctcgttctatcgccacgctgtttgaattgtgtgaacgtttgcaaatgcagctcatcatcgcagcgccggaaaatatcagtccggaaaaaggcaccacctataaactggtgcgtaaagtcttccagaataccgaacacgttcacgtcgtcggcctgcgaggatttgcgccgcaactccctgaaacgcttccaggaagtgacgaagcgccttcccaggcgagttaaaatgaaggcggcagcaatgccgccttttctttttccgaaaactccgtttctgcactaaaaaagtggcacattacggcgcgcttttctttaaacttctttacattaggttatgtaaaaacgtatcggcgtttatatactgaagataagcctgatgagtaacaggcttgctcgtcatactttcgtgagtattggcgttgtacaggcaagtcgtaaaataacagcctggctattcagagtatgataaaaacagggggcaagggatgttgcttaatatgatgtgtggtcgtcggctgtcggcaatcagtttgtgcctggccgtaacattcgctccactgttcaatgcgcaggccgatgagcctgaagtaatccctggcgacagcccggtggctgtcagtgaacagggcgaggcactgccgcaggcgcaagccacggcaataatggcggggatccagccattgcctgaaggtgcggcagaaaaagcccgcacgcaaatcgaatctcaattacccgcaggttacaagccggtttatcttaaccagcttcaactgttgtatgccgcacgcgatatgcaacccatgtgggaaaaccgtgatgctgttaaagccttccagcaacagctggcagaggtggcgattgccggtttccagccgcagtttaataaatgggtagagttactgaccgatcctggtgttaacgggatgacacgcgacgtggtgctctctgatgcgatgatgggctatctccatttcattgcaaatattccggtcaaaggcactcgctggctatatagcagtaaaccttatgcgctttcaacgccgccgctttcggtgattaaccaatggcagctggcgctggataaaggtcaattgccgacgtttgttgtaggattggcaccgcagcatccgcaatatgcggcgatgcatgaatcgttactggccttactcagtgacaccaaaccgtggccccaactgaccggcaaagcaacgttgcgcccaggacagtggagtaacgacgtaccggcgttgcgcgaaatattgcaacgtacaggcatgttggacgggggaccgaaaattacgctacctggcgatgacacgccaactgacgcggtagtcagcccatccgctgttactattgaaacagcagaaactaagccgatggacaagcaaactacgtctcgtagtaaacctgcgcctgtcgttcgtgccgcctacgataatgaactggtggaagccgttaaacgttttcaggcatggcaaggattgggggcagatggtgctattggcccggcaacgcgtgactggttaaacgtaacgcccgcccagcgtgctggcgtgttggcactcaacatccagcgattgcgcttgctgccaacagagctttctaccgggatcatggttaacattccggcctattcgctggtctactatcagaacggcaatcaggtgctggattcgcgagtcattgtcggtcgccccgatcgcaaaacgccaatgatgagcagtgcccttaacaacgtagtggtaaacccgccgtggaacgtcccaccaactctggcacgcaaagatattctgccgaaagtgcgcaacgatccgggatatctcgaaagccatggctatacggtgatgcgcggctggaacaacagagaagcgattgacccatggcaggttgactggtctacaatcacggcctcgaatttaccgttccgcttccagcaggctccaggcccacggaactcgctggggcgctataaattcaatatgccgagttcagaggccatttatttgcatgacacgccgaaccacaatctgttcaagcgtgatacacgcgcattgagctcaggctgtgtacgagtgaataaagcttccgatctggcgaatatgctgttgcaggatgcaggctggaatgacaaacgtatttctgatgcgctgaagcagggcgatacgcgttacgtcaatattcggcagtcgattccggtgaatctctactatctgacggcctttgttggtgcagatggtcgtacccagtatcgtacagatatttacaattatgatctgcctgcgcgatccagctcgcaaatcgtatcgaaagcggaacaattaatcaggtaaatgaagcagttcggggaaatcagttgtcgtaataattagcatgatcgggggcgattctctgcagcccccgtcactgctggggttgagtcatcttgacgtctgctttacgggcggttaaggtgcctcttgtgcgccagaagtgcatataaacgataacattgacctgtagacttgattatcatggacaaattcgacgctaatcgccgcaaactgctggcgcttggtggcgttgcactcggtgccgccatcctgccgaccccggcgtttgcaacactctctaccccacgcccgcgcattttgacactcaataatcttcataccggagagtcaatcaaagcggagtttttcgatggcagaggctatattcaggaagaattggcaaaacttaaccattttttccgcgattaccgcgcgaacaaaataaagtccatcgacccaggattattcgaccagttgtatcgcctgcaagggttgttaggcacccgcaaaccggtgcaactcatttccggttatcgttccattgataccaacaatgaactacgcgcccgcagccgtggagtagcgaagaaaagctatcacactaaaggccaggcgatggatttccacattgaaggtatcgcgttaagcaatattcgcaaagccgcgttatctatgcgcgcaggtggtgtaggatattacccacgtagtaactttgtgcatattgataccgggccagcacggcactggtagtaatcgcttaacgaaacaggggcagtatgaactatcgtattattccggtcaccgcattctcccagaactgttcattgatctggtgtgaacaaacccgtctggccgcactggtcgatcctggcggcgatgcggaaaaaatcaaacaggaagttgatgccagcggcctgacactgatgcagatcctgctgactcatggtcatctggaccacgttggcgcagcggcggaactggcgcaacattacggcgtgccggtttttggcccggaaaaagaagatgagttctggctgcaaggcttgcctgcgcaaagtcgtatgtttggtctggaagagtgccagccgctgacgccagatcgttggctgaacgaaggcgataccatcagcatagggaatgtgactttacaggtgttacattgccctgggcatacgccgggtcatgtcgtgttttttgatgatcgggcaaagctgctgatttctggcgacgttattttcaaaggtggagtagggcgcagtgacttcccgcgtggcgatcataatcaactgatttcttcaatcaaagataaattgctgccactgggggatgacgtgacatttattccgggtcacggaccattatccacacttggttatgagcgcctgcataatcccttcctgcaagacgaaatgcccgtctggtaaaggtgcataaaaaagcccgctttcaagcgggcttcatcggttttaacgcttacagcactgccacaatcgcttcgcacagcggcgccatgttatctggtgtcatcccagctacgtttacgcgaccagaagcaacagcatatacgccaaactcttcgcgcagacgcagcacttgttcttttgtcaggccactgaaggagaacatgccgttctgtttgatgataaagctgaagtcgcgatttgcgcctttttcctgcagcgtattgacgaacaactgacgcatacgctgaatacgctggcgcatatcagtcagttcttgttcccaaatcgcacgtaacgcatcgttgctcaggatggtggcaacaacagaagcgccgtgtgctggtgggttagagtagttagcacgaatcgccgctttcatttggctgaatgcgcgttcaacagtttcactgtcagcagcaaccagagtacaagcgccaacacgctcgttgtacaggccaaagtttttagagtaggaactggcaacaatcagctccttatgcagagccgcgaaagcgcgcagtccttcagcatcttcttccagaccacgggcaaaaccctggtaagcgaagtcaaacagcggtaaccagcctttctcaacggagagttgtgccagtgtctgccattgttccagcgtagggtcgatgccggttgggttatggcagcagccatggaacagcactacgtcgccagcctgagcttcgttcaggctgttaatcagtgcatcgaagtcaagagtgtgattttccgcatcataataagcgtattcacgaacttccagacctgcagagttaaagacgctcttatggttcggccagcttgggttgctcacccacacacgcttaacgctggtattttttgccaggaaatcggcagccacgcgtagtgcgccagtgccacccggagtctgtgccgtgcgagcacgtttgtcattgatcagggcgctacctttaccaaacagcagttcctgagtgcagcgaccaaattcagggaggccgtcaatgccgaggtaatttttggtggtttcattttcgagcagatactgttcagcctttttcacgctggtcagtaccggggttttacccgtctcatctttatagacaccaatcccgaggttaattttgccgggacgttcatcggcacgaaacagatcggccaggcccagaatcgggtcggcaggagcggcggtaatgttctcaaacatgacgaggttccattatggttacagaagggaagtccgctatcagggtaacgggagatttacaaaattccaactattactgatgaaaacgcaggctgtttttgcaagacgtgagattgctctggaaggcataaaaaaaacaggaccaaagtcctgttttttcggcatttaacaaagaggtgtgctattagaactggtaaacgatacccacagcaacggtgtcgtcagaacctacgcccagtttgttgtcagaatcgatctggttgatgatgtagtcaacataggtggacatgtttttgttgaaatagtaggttgcgcccacttcaaagtagttcaccagatcaacatcaccgataccttctacgtctttcgctttagatttggtgtaagcgatggacggacgcagaccgaaatcaaactggtattgcgcaactaacagaacgtcttgcgttttgttggcgaagccgctggtgtttgtaaatttattagtgatcggcgtagcgttacgggtttcaccgtagttcgctgccaggtagatgttgttcgcgtcatacttcagaccagtagcccactgttcagcttttttgcctttgccaagggaagactcttcctgcaggttggtacggtcagcggcaccataagcaccaacgataccaaagccttcgtattcgtagctgatagaaccgccaacaccgtcgccgttagagcggcgtgcagtgtcacgctcgtttttacccaggtactgaacagcgaagttcagaccatcaaccagaccaaagaagttggagttacgataggtagcaacgccgccaacacgaccaacgaagaaatcatcgctgtatgcagtatcaccaccaaattctggcagcatatcggtgtaacccagtgcatcataaaccacaccgtagttacggccgtaatcgaaagaaccaacgtcagcgtatttaagacccgcgaatgccagacgcgttttgttaccagtttgagcgtcagcgccctcagagttgttaccctggaagttatattcccactgaccataaccggtcagatcggaattgatttgagtttcccctttaaaaccaagacgggcataggtcatgtcgccattgccaccgtaactgttttcaccgttacccttggagaaataatgcagaccgacagctttaccgtacagatctactttgttgccatctttgttatagatttctgcagcgtttgcagtacctgctactaacagagcagggacgatcactgccagaatattgcgcttcatcattatttattaccctcatggttttttttatgacacctgccactgccgtcaataagttctgtcaataaaaatttacggaactattgatgagagtttggtgtctttatgtgtctgcaggcatctttccattcaaactaacgtttcgctaccgtgaaagtgctacaaagataaagatttagtttcaaaaagaaaaagtatgtgacaaaaagtaaaaattaaggaactttgtgaacaccgtcatatttccatagaagcgtgatgatatttacagcaatttttatctatttatatgattttcttatatttaaattaactaaacggaaattttgtttctgatggaaactttatcgaccaggcacaaaatcttctttcagacatccagaatgccaaaaatttgtatgaaaattgtgctatcagctaagaaaaaactaatccgcaataagaatgcagattattttttgtgcgtaaatgttgcagcgtaatattccgtaacaggatgatcgttatggcggggttgcaaatagattgcttgacttaacaaacagataacttgacagaaaggataaaaaaagagccagcgggcgctggctcttgaagacgctaaattagaagctggcgttacgcggagtacgtgggaacggaataacatcacgtacgttttgcacgccagttacgtaagcaatcaggcgttcaaaaccaagaccgaaacctgaatgcggaacagtaccgtagcgacgcagatcgcgataccaccagtaatcttctttgttcaggcccatttcaagcatacgctcgtccagcacgtccagacgttcttcacgctgggagccaccaatgatctcaccgatgcccggagccagaacgtccatagccgcaacggttttaccgtcttcgttaaggcgcatatagaacgctttaatatctttcggatagtttttaaccactactggtgctttaaagtgttcttccgccagataacgctcatgctcagaagagagatcgacgccccagtaaaccgggttttcaaacttcctgccgcagttttcgagaatggtcactgcgtcggtgtaatccacctgcgcgaaatcggcctcaatgaagcgttccagacgtgaaacggcatctttatctacgcgttcagcgaagaatttcatgtcgtcagcgcgttcttcgagaaccgctttgaagacatatttcagcatggcttcagccagacctgcgatatcgttcaggttagcaaacgccacttccggctccagcatccagaattccgccaggtgacggctggtgttggagttttcagcacggaaagtcgggccgaaggtataaattttggacaatgcgcaagcgtaggtttcgccgttcaactggccagatacggtcaggaaagactctttaccaaagaagtctttgtcgaaatccactttgccctgatcgttacgcggcaggttttccagatccagcgtagaaacacggaacatttcgcctgcaccttcggtatcagatgcggtaatcagtggcgttgaaacccagaagaatccctgctcgttaaagaagcgatgcagcgcctgcgccagcgtatggcgaacgcgcgcgacggcaccaatcaggtttgtgcgcggacgcaggtgagcgacttcacgcagatactcaatgctgtggcgttttgccgccatcgggtaagtgtctggatcttcaacccaaccagcaacttcaaccttgctggcctgaatttcaaattgttgcccctggcccggcgacgccacgactttacccgtcacaatgaccgagcagccggtggtcagacgcaggacgtcttcattgtaattgggcagagaattattgatgacagcctgtacaggatcaaagcaggaaccgtcataaacggcgaggaaggagatgccagcttttgaatctcggcgggtacgtacccatccgcgcacggtgacttcgctgtcaacggctacgcggccctggagtacgtcggctacaggcacaacgctcataatattctctctgttaatagtcggaaaaaataaacacttgtccacccgtaaatggggggatacctatgttacctggcatctgcaatcagacaagcagaattcgcaaatgcagcgaaagatttcggaattaaaggtaaaaaaagggagccgattagctccctgatgatattaactggcttttttaatatgcggaaggtcgaacgctttgcgcagcgcccgaacaaacgctttatcgtggcagatagttttgccagggctgtcagaaagtttcgccaccggtttaccgttacactctaccaacttaatgacaatattcaggggttttacctgggggatatcgcaggtcaggcgagtcccaataccaaaacttaattgcacgcgggaagagaagtggcggtatagctcaaccgctttgcgtaaatccagattgtcagagaaaaccagcgttttactctgtggatcaattcccagcttttcataatgtgcaatggctttttcaccccattcaaccgggtcgccagagtcatggcgcaggccctgatagcgactggcgaactcgacaccgaaatcacgcaggaaagcatccatagtgatgcagtcggttaatgcaatgccaagttggtcgggatactcttccagccaggcagcaagtgcagctcgctggctgttggctagatccgggctgatttgctgatgcgcctggaaccattcgtgtgcctgtgttcccatcggcgtgagggaaagccgacgcgccagatcgtagttgctggtgcccacgaaccaggattcctggtgcagacgtttcacgatggtttcttgtacttcgcgagaaaaacggcggcgggtgccaaaatccatcagatggaagcgcgacatatcaagaccggcggttaatgccgagaagtcgactaatttgttttccagcgtgtcgagggcttgcgcaacgtcggcctgcggtgagcgatagcgatgtaccatttcactgataaccgccagcaaaggaacttcccagaggatgacttcacgccacgggccgcttaaacgaatatccagcttgccattatcgttggacacggtgacttgttccgggttaaagcggaactcgcgtagccagttaagatagtcggccttaaagaaaggcagggcagagagccactgatattcatcatcctgcaggcgcaggtgctgcatcgcctgaacctgttcacgaatagcatcggcataaatacccagcagatcgtcacctcggcaacgaaactccgccgcgacatgcacatcgtaatagtgatgaaacacggcttgctgcatatgcaacttataagcatctgtatccagcaacgagtgcagaacaggagaagcgaattgtgtcataggtgcgcagtagcgtcctcgtacaggagcgtttagtacaataaacatcttcaggaactgctggagtataccttgtttcgcaatttattgaaccccgatcacaccatatgccacctttctggtcgatggcataacgcggtgtatgttataaaaatgtagcaataaaggcgtttgtacctgaaaagatgaagattctgcatagcgcgatttacgcaacaggaatagactgaacaccagactctataaaagatgctaaaggttatttatgactcaacagccacaagccaaataccgtcacgattatcgtgcgccggattaccagattactgatattgacttgacctttgacctggacgcgcaaaagacggtcgttaccgcggtcagccaggctgtccgtcatggtgcatcagatgttccgcttcgtctcaacggcgaagacctcaaactggtttctgttcatattaatgatgagccgtggaccgcctggaaagaagaagagggcgcactggtcatcagtaatttgccggagcgttttacgcttaagatcgttaatgaaattagcccggcggcgaatactgcgctggaagggctttatcagtcaggcgatgcgctttgcacccagtgtgaagccgaaggtttccgccatattacgtattatctcgaccgcccggatgtgctggcgcgttttaccaccaaaattattgccgataaaaccaaatatcccttcctgctttccaatggtaaccgcgttgcgcaaggtgaactggaaaatggacgtcattgggtacagtggcaggacccgttcccgaaaccgtgttacctgtttgcgttggtggctggtgattttgatgtactgcgcgataccttcactacccgctctggccgtgaagtggcgctggagttgtatgtcgatcgtggcaaccttgatcgtgcgccgtgggcaatgacctcgctgaaaaactccatgaaatgggatgaagaacgcttcggcctggagtatgacctcgacatctatatgatcgtcgcggtggatttcttcaatatgggcgcaatggagaataaggggctgaatatctttaactccaaatatgtgctggcccgcaccgacaccgccaccgacaaagattacctcgatattgaacgcgttatcggccatgaatatttccataactggaccggcaaccgtgtcacctgccgcgactggttccagctcagtctgaaagaaggtttaaccgtcttccgcgatcaggaattcagctctgaccttggttcccgcgcggtaaaccgtatcaataatgtgcgcaccatgcgcggattgcagtttgcagaagacgccagcccgatggcgcacccaattcgcccggatatggtcattgaaatgaacaacttctacaccctgaccgtttacgagaagggcgcggaagtgattcgtatgatccacactctgcttggcgaagaaaatttccagaaagggatgcagctctatttcgagcgtcatgatggtagcgcagcgacctgtgacgattttgtgcaggcgatggaagatgcgtcgaatgtcgatctttcccatttccgccgttggtacagccagtccggcacgccggttgtgaccgtcaaagacgactacaatccggaaactgagcagtacaccctgaccatcagccagcgcacgccagctacaccggatcaggcagaaaaacaaccactgcatattccgtttgccatcgaactgtatgacaacgaaggcaaagtgatcccgttgcagaaaggcggtcatccggtgaattccgtgctgaacgtcacccaggcggaacagacctttgtttttgataatgtctacttccagccggtgcctgcgctgctgtgcgaattctctgcgccagtgaaactggaatataagtggagcgatcagcaactgaccttcctgatgcgtcatgcgcgtaatgatttctttcgctgggacgcggcgcaaagtttgctggcaacctacatcaagctgaacgtcgcccgtcatcagcaagggcagccgttgtctctgccggtgcatgtggctgacgctttccgcgcggtgctgctcgatgagaagattgatccggcgatggcggcagaaatcctgacgctgccttccgtcaatgaaatggcagaactgttcgatatcatcgacccgattgctattgccgaagtacgcgaagcactcactcgtactctggcgactgaactggcagatgagctgctggctatttacaacgcgaattaccagagcgagtaccgtgttgagcatgaagatattgcaaaacgcactctgcgtaatgcctgcctgcgcttcctcgcttttggtgaaacgcatctggctgacgtgctggtgagcaagcagttccacgaagcaaacaatatgactgatgcgctggcggcgctttctgcggcggttgctgcacaactgccatgccgtgacgcgctgatgcaggagtacgacgacaagtggcatcaggacggtctggtgatggataaatggtttatcctgcaagccaccagcccggcggcgaatgtgctggagacggtacgtggtctgttgcagcatcgcgcatttaccatgagcaacccgaaccgcattcgttcgttgattggtgcgtttgcgggcagcaacccggcagcgttccatgccgaagatggcagcggttaccagttcctggtggaaatgcttaccgacctcaacagccgtaacccgcaggtggcttcacgcctgattgagccgctgattcgcctgaaacgttacgatgccaaacgtcaggagaaaatgcgcgcggcgctggaacagttgaaagggctggaaaatctctctggcgatctgtacgagaagatcaccaaagcactggcttgatacttttgagccaaaatgcttgacgcgtcttatcaggcctacaagtccgttgaaattgctggttttgtaggctggataaggcgttcacgccgcatcaggcagtcgtgcccaactgcctgatgcgacgcttgacgcgtcttatcaggcctacaatcccgttgaaaatgctggttttgtgcgccacatccggcatattaaccatgacgtcgaatcggttgttcagagtgcccacgttgcatcacccgctgcaacacttccgcttccagctctgctaatcgtaccgaccctaaccggcgcggacgggggatatccaccgtcaaatccagaccaatttttccctcttcaattaacaacacccggtcagccatcgccaccgcttcgctcacatcatgcgtcaccagcaaaacggtaaaaccgtgcttcagccaaagcgacacaatcaaatcctgcatctcgagtcgcgttaaagcgtccagcgcaccgagtggttcatcaagcaacaataaacctggtcgatgaatcagcgcccttgccagcgccacacgttgtttctgcccgccagaaagtgcggcaggccattcccccgcgcgattctccagtcctaccgcagccagagcctgacgcgccgcatcgcgccactggcctttaaggcctaacccaacgttatcaatcaccgatttccacggcagcagacgcgcgtcctgaaacatcattcgcgtatcatcctgaatctcagccagcggtgtggtgcccgctaacacgtcgcctgcggttggcgtttccagacctgccagcaggcgcagcagagtacttttgccaccgccgctgcggcccaccaccgccacaaactgacctgccggaatatgtaaatccagttggttcaggacgatattttccgcgtaatgtttgcttactgcattgagcaacaatggtgtgccctggttcagacgagccgtattcataccgtggcctccttcaaatgataagccgggttccagcgcaaccagagacgttctaacagctgcgcgctgacgtcagcaagtttgccgagcagggcgtaaagaataatagcgactaccaccacgtccgtttgcagaaactcccgcgcattcatcgccagataaccaatgccggaattggcagaaatagtttcggcaacgatcagcgtcagccacatcaggcccaacgcaaaacgcacaccgaccataattgagggcagggcaccaggcaggatcacatggataaacagcggtatgccggataatccatagctacgtgccatctccaccagcccacggtcgatattacggatgccatgccaggtgttgatataaatggggaatagcgtaccgagcgccaccagaaagatttttgcggattcatcaatgccaaaccacaaaatcaccagcgggatcagcgccagatgcggcacgttgcgcaacatctgaatggaggtatccagcagtcgctcaccccagcgtgacagcccgctaatcagccccagaattaatcccagcgatccgccaattgaaaaaccaatcagcgcacgccaggagctgatcgccagatgctgccacaattcgccgctggcagagagcgtccagaacgccatcaccactccttccggtgagggcaaaatacgcgtcgataaccagccaaccgaggaggccagttgccacaccgccacgatgcccaccggtaaaaaccagggggcaacgcgcaataaccacttcttcactggcgttgccatcatcgtgttccttagctttgcgcgacgttacgggggataaaatcattcgccaccgcttcgccttgtggattcagcggttgtggctggggaatttccgggatggcgacatccagatgtgggaacagtaactcgccgacccgatacgcttcttccagatgcgggtagcccgaaagcacaaaactgtcgatgccaagtgcagcgtattcgttgattcgcgcggcgaccgtaggaccatcgcccaccagcgccgtcccggcaccgccgcgcactaagccaacacccgcccataaattggggctgatctccagattgtcgcgcttgccgttatgtagcgccgccattcgctgttgtcctacggaatccgttcgggcgaatgcggcctgtgctttggcgatagtttcatcatcaagacgcgagattaaccgctcggcggcctgccacgcttcgtcgttggtttcacgaacaatcacatgcagacgaacaccgaaacgaattttgcgtccatgcgcggcagctttcgcccgcacgtgttcgattttctcttttaccagttccggtggttcgccccaggtaaggtagagatcaacttgttctgccgccagctcctgggcgacatctgacgatccgccaaagtaaagcggaggatacggctgttgaatcggcgggaagagcagtttggctccgcgtacatgaatatgtttgccgttgaaatccacagtctcgccaagcaacaaccgccgccagacctgggtaaattctgccgaggcttcgtaacgctcgctatgatcaaggaacacgccgtcgcctgccagttcttgtggatcgctgcctgtgaccaggttaaacaacgcacgtccgttagagagacggtcaagcgtggcggcctgacgggcggcaacggtaggtgaggttacgctggggcgcagggcgacaagaaacttcagccgttgtgtcaccgggatcatcgacgccgccaccagccacgcatcttcacacgatcgccccgtcgggatcagcacaccggtatagcccagacgatccgccgcttgcgcaatttgttgcagataaccgtgatcaaccggacgtgaaccttcttccgttcccagataatgcccgtcaccgtgggtcggtaaaaaccagaacatattcagactcataattgttttccttccagttgagtgggctgccagatgcgctggcgaatatcgacttttttcggcaccagacggttttcataaaacagatctgccgtttgctgctgtaaggcggcaacttcagcgctcaacggtttgatggtggtgggaggacgatgatccagatacgaggcaataaccggtgccggtaagcccatcgtttttgccagtaaagcgatgctttgttcgcgctggctgcgggttaacgcatcggcctcactaaaggttgtcagcacaccctgaataaaagcgccgtttttttctgcatacggacgagctgccagataaaacgatccagtttgattgagatcggtgccgtctttcagcacccgcacgccgccctgtaataatgcagcggagtagtagggatcccagatagcccaggcgtcaacgttaccttgctggaacgcggcgcgggcatcggcaggcgtcaggtaagtgggctgaatatccgtgaatttaagcccggcctggcgaagggctcgcagtaaaagattgtgcgaactggaacctttctgaaaggcaactttgtgacctttaagatcggctacggttttgatcgggctgttttctgccaccagaatcacttcggctttgggtttcggtggctcgacgcccacgtataccaaatcagccccggcagcctgggcaaagattggcggaatatccccggtactgccgagatcgatactgccaacgtttaacgcctccagcatctgtgggccagcggggaactccacccaggagatttttgtttgcggatagcgtttttccagtaactggtggctttttgccagcaccataccaatactgcctttttgatagcctatacgtaacgcctctggcgaagactccgcggcaacagcaagtgtagagacgctaagtaaacccgccagcgccagtttaatgatcttacgcatgggcattacctcgcagagacagaaggtcaggaacctgaacatcgcggcggtgcaacgcctgccagaaagtttctagcgcggtatcaagacgagtttgcagatttggcgtgaactggggtttgtgttggtaatcaattaattgcgagtcatcggcaaacacgccgtgcaggatctcctgggctttcagcgtacttaaaactggcttaagggcataatcgaccgccagcagatgggccacggtgccgcctgtcgccagcggcagcaccactttgccttgcaacgcacgttctggcagcaggtcgagcagggttttcagtgcaccggaataggcggctttatacacaggcgtggcgacaatcagcccatcggcctgttgcagctgttcggtgaaggtcttgagtgccggactatcgaaacgagcataaagcagatcttccgggacgaagttttgcaaattccagtgataaacctctacatccaggccatttagtttttcccgcgcatattccagcaaggagctggagcgagaaggaaagcgaggactacccgccagggtgatgacacgcatactctctccttataaccaattgttcttgttttgttaacattgataacaattcggtcagtctgacagagggcgtccgcgagtcgaaatgatttatctgaggaagaaaagccaaaaaaagcataaaaaaagcgcaataagaaaacgtttgctatttattgccgcaggtcaattcccttttggtccgaactcgcacataatacgcccccggtttgcacaccgggaatccaggagagttcatgtactaccccttcgttcgtaaagcccttttccagctcgatccagagcgcgctcatgagtttacttttcagcaattacgccgtattacaggaacgccgtttgaagcactggtgcggcagaaagtgcctgcgaaacctgttaactgcatgggcctgacgtttaaaaatccgcttggtctggcagccggtcttgataaagacggggagtgcattgacgcgttaggcgcgatgggatttggatccatcgagatcggtaccgtcacgccacgtccccagccaggtaatgacaagccgcgtctctttcgtctggtagatgccgaaggtttgatcaaccgtatgggctttaataatcttggcgttgataacctcgtagagaacgtaaaaaaagcccattatgacggcgttctgggtattaacatcggcaaaaataaagatacgccggtggagcagggtaaagatgactatctgatttgtatggaaaaaatctatgcctatgcgggatatatcgccatcaatatttcatcgccaaataccccaggattacgcacactgcaatatggtgaagcgctggatgatctcttaactgcgattaaaaataaacaaaatgatttgcaagtgatgcaccataaatatgtgccgatcgcagtgaagatcgcgccggatctttctgaagaagaattgatccaggttgccgatagtttagttcgccataatattgatggcgttattgcaaccaataccacactcgatcgttctctggttcagggaatgaaaaattgtgatcaaaccggtggcttaagtggtcgtccgcttcagttaaaaagcaccgaaattattcgccgcttgtcacaggaattaaacggacgcttgccgattattggtgttggcggcattgactcggttatcgctgcgcgtgaaaagattgctgcgggtgcctcactggtgcaaatttattctggttttatttttaaaggtccgccgctgattaaagaaatcgttacccatatctaattatttcttcaaattcctctttataagataatcagggctttattttcagccctggttgttttatattcatcgctgttgcttatttagacattttgtacttttattgttgaggttattaagcgaagcgacaatggattgtgtcgctgcggttttataaggttggggagtggcagatgcgaattaaaccagacgataactggcgttggtattacgatgaagagcacgatcgaatgatgctcgatttagccaatggtatgctatttcgctcacgttttgcgcgcaaaatgttgactccagatgccttttctcccgcaggtttttgcgttgatgacgccgcgctctatttctcttttgaagaaaagtgccgcgattttaatttatctaaagaacaaaaagccgaactggtgctgaatgcactggtagcaattcgttatctcaaaccgcaaatgccgaaaagctggcattttgtatctcatggtgaaatgtggatgcccatgccgggcgatgcggcctacgtttggttgagcgacactcatgagcaagtgaatttactggtcgttgaatctggcgagaatgccgcgctatgtctactggcacaaccctgcgttgttattgcgggtcgcgcgatgcagttgggcgacgccattaaaatcatgaacgacaggctgaaaccgcaggttaatgttgacagcttcagcctcgaacaggcagtctaacgcgccagcttaagcgcagtcttcggtacacaactacagcaaagaatagtgccatcatcgcctattgctgatttttttagcggcgtgacttcgccttctaaaagctgaacacggcaacttccacaaatgcccgcgcggcaagaataagggatacgaattccctgattttctaattgctccagcagcacctgttggttatttccacgaaatgcctgtccctgccagtcaatatctacgtttgcgtccggttgttgcgtggtgttggcagtatcatcagcggcacctgcgccgtaaattttagccggagccgttgccagaatttccacctcgtcgccaacgcgaatcacgccgctattacgggcaattaaattctgaccaaaatcgacatcgccgttatcctgggcagtacggaaagattgcagcgtttttaatggttcgcctgccggatgtttttgccctttttctgggctgacggtggtgaaaatacagcggctacaaggcttaaccacatcaaacacgacatcaccaatgcgaatcactttccagctatcttcttcccaggccgatgcaccggaaaccaccagattggggcggaattgctccatttttacactggccggacaacgttgttggagatcacgtaacgaggcctcgttagcaagaaggtaaggatagccatcagcaaatgacaggggtacagtgttgtggcgtttcacgcgccgggtcatttgtggccccacccagcgtaattgcacttcgcgggagaaaaatccacttagccatttgttgatcgcgtctggcgcaattcgcgcggtaaaatgtgtgccccaaacttcggttggtgcgtcttgtgtggcgaaatcagcaaaacgaacatatgcactactgccatctggtgcggtgagatgcaagccatcatgcacgggtgaaggagtaaaccgtaccattagcggaaactggcgagcggtaataaacgtaccgtcaggttccgtgatcataaagatgcgatcgaaggccagaccactgacatctgccagggtatgtgtaagaccaatgccgcgcatcgatttaacaggatgaataaaaagccgggttaatgtcgccacggtgcggtcctcaaatgaaaataagccctcaactttatgacatgacgcgcttattagctataatgcgcaacaattttcttagagtaaaagtgacaatatgaattctctgtttgccagtacggcccgtgggctggaagagctgttaaaaactgaactggaaaacctgggggccgttgaatgccaggtggttcagggtggggtccatttcaagggcgacacacggcttgtttaccagagcctgatgtggagccgcctggcctcgcgtattatgttgccgctgggcgagtgtaaggtttacagcgatttagacctctatctcggtgttcaggcgatcaactggacagagatgtttaatcctggcgcgaccttcgctgtccacttcagtggtttgaatgacaccatacgcaacagtcagtacggtgcgatgaaagtgaaagacgcgatcgtcgatgctttcacgcggaaaaatctgccgcgtccaaatgttgatcgcgatgcgccggatatccgcgttaacgtctggctgcataaagaaaccgccagtatcgcccttgatctcagtggtgatggtttacatctgcgtggctatcgcgatcgtgctggcattgcgccgatcaaagaaaccctggcagccgctattgtgatgcgatccggctggcagccaggaacaccgctgctcgatccaatgtgtggttcaggtacgttgctgattgaagcggctatgttggcgaccgaccgcgcaccgggcttgcaccgtgggcgttggggctttagcggctggacgcagcatgatgaagctatctggcaggaagtgaaagcggaagcgcaaactcgtgcccgtaaaggcctggcggagtatagctcccatttctacggttcggacagtgacgcacgggtgattcaacgtgcgcgcactaacgcccgtcttgcggggattggtgaactgatcacctttgaggtgaacgatgtcgcgcaactggccaatccgctgccgaaagggccgtacggtacagtgttgagcaacccgccatacggtgaacgtctggacagcgaaccggcgctgattgcgctgcatagtctgctgggccgaatcatgaaaaaccagttcggtggctggaatctctctttgtttagtgcctcgccggatctgctaagctgcctgcagctgcgtgcagacaaacagtacaaggcgaaaaacggcccgctggactgcgtacagaaaaactaccatgttgccgaaagcacaccagacagcaaaccggtaatggcagcggaagactacgccaaccgtctgcgtaagaacctcaaaaaattcgagaagtgggctcgccaggaaggaattgaatgttaccgcctgtatgacgccgatctgccggaatataacgttgccgttgaccgttatgccgactgggtggtggtgcaggagtatgcgccgccaaaaactattgatgcgcacaaagcgcgtcagcgtctgttcgatattatcgctgcaaccatttcggtactggggattgcgccaaacaaactggtgctgaaaacccgtgaacgccagaagggcaaaaatcaataccagaaactgggcgagaagggcgagtttctggaagttaccgaatataacgctcacttgtgggtgaacctgacggattacctcgataccggtctgttcctcgatcaccgtatcgcccgtcgtatgctcggtcagatgagcaaaggcaaagatttcctcaacctgttctcttataccggcagcgccaccgtgcatgcgggattaggcggtgcacgcagcaccaccaccgtggatatgtcgcgtacttatctggagtgggcagaacgcaacctgcgtctgaatggcctaaccgggcgtgcgcatcgcctgattcaggccgattgcctggcgtggctgcgtgaggcaaatgaacagtttgatctgatctttatcgatccgccaaccttctctaactcaaaacgaatggaagatgcgtttgatgttcagcgcgatcatctggcgctgatgaaagatttgaaacgtctgctgcgtgcaggtgggacgatcatgttctcgaacaacaaacgcggcttccgtatggatctcgacggcctggcgaaactgggactgaaagcacaagaaattacgcaaaaaacgctctcccaggatttcgcccgtaaccgccagatccacaactgctggctgattaccgcagcctgaaaggaatagtaatgtcattaatcagtatgcatggcgcatggctgtcgttcagcgacgcgccgcttctcgataacgcagaactgcatatcgaagataacgaacgtgtttgtctggtggggcgtaacggtgcaggcaaatcaacgttaatgaagatcctcaaccgtgaacaggggctggatgacggtcgcattatttatgagcaagatttgattgtagctcgtctgcaacaggatccgccgcgtaacgttgagggtagcgtttatgatttcgttgccgaaggcattgaagaacaagcggaatacctgaaacgctatcacgatatttcgcgcctggtgatgaacgacccgagcgagaaaaatctcaacgaactggcgaaggttcaggaacagctggatcaccacaacctgtggcagctggaaaaccgcatcaacgaagtgctggcgcaactgggattagatcctaatgttgcgctgtcgtcgctttccggcggctggttgcgtaaagcggcattaggacgcgcgctggtgagcaatccgcgcgtattgctgctcgacgaaccgactaaccacctggatattgaaaccatcgactggctggaagggttcctcaaaaccttcaatgggacaattattttcatttcccacgaccgttcgtttatccgcaatatggcgacgcgcattgttgatctcgatcgcggcaagctggtgacctatccagggaattacgaccagtacctgctggaaaaagaagaagccctgcgcgtggaagaattacaaaatgccgagttcgatcgcaaactggcgcaggaagaggtgtggatccgccaggggatcaaagcacgtcgtacccgtaatgaaggccgcgtacgcgccctgaaagcaatgcgtcgcgagcgtggtgaacgtcgcgaagtaatgggtaccgcaaagatgcaggtggaagaagccagccgctccggtaagatcgttttcgaaatggaggacgtttgctaccaggttgacggtaagcaactggtgaaagatttttctgcccaggttctacgcggcgacaaaattgccctgattggtccgaatgggtgcggcaaaaccacgctgctgaaactaatgctcggtcagcttcaggcggacagcgggcgtattcacgttggcaccaaactggaagtggcttatttcgatcagcaccgtgcggaactggatcccgataaaacggtgatggataaccttgctgaaggtaagcaagaggtgatggttaacggcaagccacgtcatgttttgggctatttgcaggacttcctgttccatccaaaacgggcgatgacgccggtacgtgcgctttctggcggtgagcgtaaccgcttgttgttggcgcgtttgttcctcaaaccaagcaacttattgattcttgacgaaccgaccaacgatcttgatgtcgaaacgctggaactgctggaagaactgatcgacagctatcagggcacggtattgctggttagccacgatcgtcagtttgtcgataacaccgttacagaatgctggatcttcgaaggcggcggtaaaattggtcgttatgtcggcggttatcatgatgcccgtggtcagcaagaacagtatgtggcgctcaaacagcctgcggtgaaaaaaagcgaagaagccgccgcgccaaaagcagaaactgtaaaacgcagcagtagcaaactaagctataaattgcagcgcgaactggagcagctaccgcaattgctcgaagatctggaggcgaagctggaagccctacagacgcaagtggcggatgcttccttcttcagtcagccccatgagcagacacaaaaagtgctcgccgatatggctgctgcagagcaggagctggagcaagcctttgaacgctgggagtatcttgaagcgttaaaaaatggtggctgatcgcaaaatagtcgatttaaacagagacagctgacaacggtaaaattgcctgatgaactgggtttatcaggcatgaaaaccaacactttgttcgtcatctgtaaaatagcgcatcattaaggagtaccaatgtgcgaacatcatcatgccgcgaagcacatcctgtgctcgcagtgtgacatgctggtggcgttaccgcgccttgagcatggtcagaaagcggcatgtccccggtgtggcacaacgttaaccgtggcgtgggatgcccctcggcagcgtcccaccgcctatgcgttggctgcactgttcatgctgttgctgtccaacttgtttccttttgtgaatatgaacgttgcaggagttaccagtgaaattacattactggaaattcccggcgtgcttttttctgaggactacgccagcctcggcacctttttcctgttgtttgtgcaactggttcccgcgttttgtctgataaccattctgttactggtgaatcgcgcggaattaccggtccgtttaaaagagcaactggcacgggtgctttttcaactcaaaacctggggaatggcggagattttcctcgcgggtgtgctggtcagtttcgtgaaactgatggcttacggcagcattggggtaggcagcagctttctcccctggtgtttattttgtgtcctgcaactgcgcgcttttcagtgtgttgatcgtcgctggttatgggacgacatcgccccgatgccagaactgcgccagccgctaaaaccaggtgtcacggggatacgtcaggggctgcgttcgtgctcctgttgtacggcaatccttcctgctgatgaacccgtgtgcccgcgttgtagtaccaaagggtacgttcggcgtagaaacagcctgcagtggacactcgcgctgcttgtaacgtccatcatgctgtatcttccggctaatattttgcccatcatggtgacggatttattaggctcgaagatgccgtcgacgattctcgctggggtcattctgttatggagcgaaggctcttatcccgtcgctgcggtgatttttctggccagtattatggtgccaacgttaaagatgatcgccattgcgtggctgtgttgggatgccaaaggacacggcaagcgcgacagtgaaagaatgcatttgatttatgaagttgttgagtttgtaggccgctggtcgatgattgacgttttcgttatcgcggtgctctcggcgctggtgcgtatgggaggtttaatgagtatttatccggcaatgggtgcattaatgtttgctttagtcgtcataatgacaatgttttctgctatgacgtttgacccgcgtttgtcgtgggatcgtcaacctgaatcagagcatgaggagtcctgacagtatggaatctaataatggggaagccaaaatccagaaagtgaagaactggtctcccgtgtggatatttcctatcgtcacggcgctcattggggcctgggttcttttttatcattacagccatcagggaccggaagtgaccctgatcaccgcgaatgcggaaggaattgaaggtggcaaaaccaccattaaaagccgtagcgttgacgtcggcgtggttgaaagcgccacactggctgatgatttgacgcacgttgaaatcaaagcgcggctgaattccggtatggaaaagttgctgcataaagataccgtcttttgggtggtgaaaccgcagattggtcgagaagggattagcggcctgggaacactgctgtctggggtttatatcgaactgcagccaggcgcgaaaggcagcaaaatggataaatacgatttgctggactcgccaccgttggccccacctgatgcgaaaggtatccgtgtgcttctcgatagcaaaaaagccgggcagctctcgccaggagatccggtgctgttccgtggctatcgggtaggttcggttgaaaccagcactttcgatacgcaaaaacgcaatatcagttatcaactgttcatcaatgcaccttatgaccgactggtgaccagcaatgttcgtttctggaaagatagtggcattgcggttgatctgacgtcagcgggaatgcgtgtggagatgggctcattgacaacgctgcttagtggcggtgtcagctttgatgtgccggaaggtctggatttagggcagccagtggcaccgaaaacagctttcgttttgtatgatgatcagaagagcattcaggattcgttgtacaccgatcacattgattatctgatgttctttaaagattcggtacgcggtctgcaaccgggagctccggtagaattccggggtattcgcctgggtaccgtaagcaaagtgccattctttgcgccgaatatgcgtcagacatttaacgatgattaccgtattccggtactgattcgtatcgagccagagcggctgaaaatgcagcttggcgaaaatgcggatgttgttgagcaccttggcgaattgttgaaacgtggtttacgcggatcgctgaaaaccggaaacctggtcactggcgcactgtatgttgatctcgatttctatccaaatacgcctgcaataaccggtattcgtgaatttaatggttatcagattatcccgaccgttagcggcggtctggcgcaaatccagcaacgactgatggaagcgttggataagatcaacaaactgccattgaatccgatgattgaacaggcaaccagtacgctttctgaaagtcagcgcacaatgaaaaacctgcaaacgacgctggatagcatgaacaagatccttgccagccagtcgatgcagcagttaccgacggatatgcagtcaacgttgcgtgaattgaatcgcagcatgcagggcttccagcctggttccgcagcctacaacaagatggtggcggatatgcagcgccttgatcaggtgttgcgagaactgcaaccggtgctgaaaacgctcaacgagaagagtaacgcgctggtatttgaagcgaagggcaaaaaagatccagagccgaagagggcgaaacaatgaaaaagtggctagtgacgattgcggcactgtggctggccggatgcagctccggcgaaattaataaaaactattaccagttacctgtggtgcagagcggtacacaaagcaccgccagccagggtaatcgcctgttatgggttgagcaggtcgctgttcctgactatctggcggggaatggtgtggtttatcaaaccagtgatgtgaagtatgtgattgccaacaacaacctgtgggccagcccgttggatcaacagttgcgcaacaccctggttgccaacctgagtacgcaactacccggctgggtggttgcctcccagcctctgggaagcgcccaggacacgctcaatgttaccgtcacggagtttaacggtcgctatgatggcaaggtcattgtcagtggtgagtggctgttgaaccaccagggacaactgatcaaacgtccgttccgtctggaaggaatgcaaactcaggatggttacgatgagatggttaaagtgctggccagtgtctggagtcaggaagccgcttctattgcgcaagagataaagcgtctaccttaatcataaagatttgtaaatataaccgcctccggtatgttgcctgaggcgtttttttgtttctaacgtgcggaaaaagttgttcctcttcacattttttgtacaaccgacatgcccgtgtagctcacaaatatgacagtggcgtgaattttgcgcattgacggcagttatgattcgcggtattgcttaactgtgattgcatatttagtaatcactgttttcttttccaccagaaaccagtatgagggaaacgaggcatgaagagacaaaaacgagatcgcctggaacgggcacatcaacgtggttatcaggccggcatcgccggacgctcaaaagaaatgtgtccctatcagacgctgaatcaaaggtcacaatggctgggaggctggcgagaagccatggcggacagggtagtaatggcctgattctgtctctttaaaaagaaacctccgcattgcggaggtttcgcctttatatactctgtctgattaaaatcagaatgcagacgtatcctggaacagaccgactttcaggtcgttggcggtatagatcaaacgaccatcaaccagcacttcgccatcagccaggcccataatcagacgacggttaactatgcgtttaaagtgaatacgataggtcacttttttcgccgtcggcagcacctggcctgtgaatttcacttcacctacgcccagcgcgcgacctttaccttcgccgcccagccagccgaggtagaaccctaccagctgccacattgcgtccaggcccaggcatcccggcataaccggatcgccgataaagtggcatccgaagaaccacagatccggattgatatccagctctgcttcaacataccctttgtcgaagttaccacccgtttcggtcattttgaccacacggtccatcatcagcatgtttggtgctggcaattgcgggcctttagcgccaaacagttcaccgcgaccagaggcaagaaggtcttcttttgtataggattcgcgtttatctaccatgttctctgtaagccttattttattgaagcacgcaggatagctaacacgtgtacgctgaacaagtccgatcagttcggaataaaccagttcagccaacgtaatggccatggaaaacggtgacgtccttcctgttgcgatgcttgtgcgatacgttcctggatggtttgcatcagcgtcgtttggccttcgccatcccacaccagatttaataataacggcagtgcgtcagtcacatcgtctactgcccagatggtgaatttgtcttcttctaccgctttcaccagttcactgtgaagacttaaatggcgaacgttagctgtggggataatgacaccttgtttccccgttaactcacgttgctggcaaatagcaaagaagccttcgattttctcatttaaaccaccgactggctgggcgcgaccgaactgatcgactgaacctgtgatagcgatactctgattcaccggcacatcggcgagggcgcttatcagggcgcagagttcagccatcgaggcactatcgccatccacttcactgtatgactgctcaaatgtcagcgatgctgagaaggggatctgttgctcaagctgtagttccgacatcaggaacgcttgcatgatcatcatccctttcgcatggatattgccgccaagctccgctttgcgttcgatgtcggtgaattcaccatcgccaatatgcacaacgcagctaatgcgagaaggttcgccaaaagcgcgtggatgacccggaaattcaatgaccgaaagggcgttaatttgcccgatgcgttcgccttcggtttcaatcaggatttgctcctgaaggatctcatcctgcatgcgttcagcgaggaaaccttcgcgccattcacgctgctgtagcattaagtttagctgctcgccggagaaggtgtcgccatcacacagggaggcgacctcttgacactggcggaggatccactgcgggctaagcggaagtgtttcttgttcaccagtgtagcgtgctgcttcgcggataagtaccggccaggcatccgctcccggtgctggtaagtgattatgtttggcggtaaatgtcacccagcgacaccactggcttactgactccgcatcgacaatctgcagagtatcttcaaattcgctataaatagtctgctctgaaagctctggctccatctcctggaaatcagccaatgattcgcgttcgcctaccagaatgactttcagcttcaatggcatcgaaggcacagagacggggagagggcgcgactcatcaaacgcaacccagtcaaaacgctcgcggttaacgatatttttcagccgcatccacagcagaggttgcgccagcagtgtacgcaaagagatgatgagaataccgccatttgcctgatgcaccagaccaggctgcagggtaatgtcgccattaaactgacgcaggcagccaaagagttgctctgcttctacccagtcggcagcgacaacttgcgttaaagtcgcaaaattatcatctgcactcactgcgtgacgtaagcggatggtgtggccggaaacctcatagtgaccgcccaccagttggcctgcatcgctttgtagcgtacgcgcggcatcagcaataagattcagatactcagactcttccggggccttcgccagcataaaagaggaggatgctcgcgtatgcagcaactgctccagcgcaaattgcagtcgcggttgagtatcactgaataaaggatcgttttcgtcaatcaaatgtggctgagcaaatatttcctgatagctatcggtatcaggaaccaggtcacgccatgcaagtttcgtaatggtcaaagttgatgttttttagtctgttgtcaaagccgcgattataccgtaaccggcactgcagcacacgtagaaagcaacgacaatactcctggcatgggcgttaaagctcacaggatggagattcttttcttcactggcctaaaaagctgatattctgtaaagagttacacggtaacattgagatcgctatgaaatatcaacaacttgaaaatcttgaaagcggttggaaatggaagtatctggtgaagaagcaccgcgaaggggagttaatcacccgttacatagaagccagtgccgcccaggaagccgtcgatgagttgctctcgctggaaaatgaacccgtgctggtaaatggttggattgacaagcatatgaatccggaactggtcaatcgcatgaagcagaccattcgggccagacggaagcgccattttaatgcagaacaccagcatacgcgcaaaaaatcgatcgatctggaatttatcgtctggcaacgtctggctggccttgcgcagcgtcgcggtaaaacgctttctgaaacgattgttcagctgattgaagatgcggaaaacaaagagaaatacgcgaataaaatgtcttctttgaagcaggatctgcaggcattgctgggtaaggaataactgtcaaaagtcagttcaatttactaaaggcgaaaaaaaaaccccgcagctgcggggtttttctaccagacgagaacttaagcctgcggctgagttacaacgtctttgatgcctttaacttcgatctctacgcgacgatccggagccaggcaatcgatcagtgcagcacgctgtttcacgttgtcacaggtgttgccagtaaccgggttggattcgcccataccacgtgcggagattttgtctgccgggatacctttagagatcaggtaatcaacaacggactgagcacgacgctcggacagagcctggttataagcgtcagaaccgatgcggtcagtgtaacccagaacaactacggaaccgtctttcggatccaggttgctcagctggctgtacagctgatccagagcagcctgaccttccggtttcagggttgctttgttgaaggtgaacagaacgtcagacttcagagtgaagtgcttggtctgtacttccggtgccggagctggagccggagcaactactggagctacttcgccctgaccgaaacggtaggaaacacccaggctcagcatgccgttgtccggacgagtgccgatggtgtgtgcgtcaccgatgttgttggtccactggtattccagacgggtagcgatttcaggagtgatcgcatactcaacaccgccagcgaagaccggagaaacgccggtgtcgtggtctttaaaggatgcgccaccaggtacgttagccttggtgtctgcacgccataccataccacccagacgagtgtagatgtccagatcgtcagtgattgggtaacccagtttagcggtcagctgaacgccctgagctttgtatgcgccgttgatgttgtcgcctttgtacggcatacgacctaaccagtcgtaacccatttcaaagccaacatacgggttaacctggtaaccaccaaaagcacctgcacccagttggttttcgtgggtcggaccattgttaggaataaaaccagtgtcatggtactgggaccagcccagtttagcaccagtgtaccaggtgttatctttcggagcggcctgcgctacggtagcgaaaccagccagtgccactgcaatcgcgatagctgtctttttcattttttgcgcctcgttatcatccaaaatacgccatgaatatctccaacgagataacacggttaaatccttcaccggggatctgctcaatattaactctaccgatatcttcggcttatgccgagcacccctggcgatgtaaagtctacaacgtagttgaaaacttacaagtgtgaactccgtcaggcatatgaaaaaaaagtcttgtataaggtacgtttaatcttttttgtcagcgacaatttacagaagaaaatcgcggaaaccgcttcagacaagcctccgcaaggaaaattagtcacgactgaaagcattggctgggcgacaaaaaaagttccaggattaatcctaaatttacttaatgatacaaattagagtgaatttttagcccggaaagttgtctcgttgcgtgagaggatgcgcttaccggacgcataataaaccccatagcgttaccttcatttgccgcatcaacaagttcagcatgctcttctgcagtcaaatcatctgccaaccaaccgatcaccacgctgtaattgcccgtgcgtaaagcgcgaaccattgactccacggtgtggcaaggggagagctggctaatctgcattactttcgttaagggtagcccagatgcctgaacccattcgcgactcagtttttgttgcggtgttaaccagagttgccagcgcgattgctgaccgagttgctgtaacaatggcaacagtagaagttgcgtcatcatgggctgatcttcgcgatagacaacttcactgataagcccggctgtagtgttttccgtagagacacgcgcaattttacttgctgcggatgagaacgacgaagaacgatgtgcatagcctgaagtgtacataatcaatccagcccctgtgagttactgtatgaatgtacagtacatccagtgacgacaaagatcaactctattttcggaaagagcctcgcaaattttgtcgttggtgacgggaaaacataaattaatcttgccccttaagaataagttgcctattttcgtagttaacggatccgttaatgtgaatcattcttttatgttatgattttaaaaggaattttatgaaaagcctctcctataagcggatctataaatcacaagaatacctggcaacgttgggcacaattgaataccgatcattgtttggtagttacagcctaaccgttgacgacacggtgtttgcgatggtttctgatggtgagttgtatcttcgggcttgtgagcaaagtgcaccgtactgtgtaaaacatccgcctgtctggctgacatataaaaagtgtggccgatccgttaccctcaattactatcgggttgatgaaagtctatggcgaaatcaactgaagctggtgcgtctgtcgaaatattctctcgatgcagcgctgaaagagaaaagcacgcgcaatattcgggaaagactgaaagatttgcccaatatgtcttttcatctggaagcgattctcggggaggtggggattaaggatgtacgggcgttacgtatacttggggcaaaaatgtgttggttgcgactgcggcagcaaaacagtctggtgacagaaaagattctgtttatgcttgaaggggccattatcggcattcatgaagctgcgctcccggtggcacgccgccaggagcttgcagaatgggctgactctcttacgccgaaacaggagtttcctgcggaacttgagtaatctggcgttgcagacgaccaatctctggcagtaatgcaatcaataacccaacttgttgtacgaccagaggttctttgctgtctgcccgtggttcaagttgctgcatccgctgtttcaggccagctaatgcctgattgacgcgttcttcatcagcaggttgatgatgtagcgcgtcatcaacatagcaaactgcgtcatcaagaaacgccagaatttcaggattagttaactgctcccggtgagcaccgagggctgagatatagctggtaaacgtatggttaaggcacagcaaccgaaacgcggcctcgcgaatttgcggggtaacgttcggctcgctggacatatttgataccaccgacgccagttcagcatcacggttgtgtgcatcgcggcgggcaatacgatacgccagacggttatcacgcccctgatggtattgctccagtatggcatcgagatagcgacagttggcctcggtggcacgttcgagcatgcgcggcagattgcgaaacttccagtcaggccagatgtagctcaccgccgcccacgcaatggcacaaccaatcagcgtatcgattacgcgaggtaacgccacttcaaaaccttcacccagcaagttaaaacaaagtagcaccaaaagtgtgatgaacatcgttgcatgggcgtattgcacgttacggaaggcaaaaaagagcacgccggtaataaccagtagcaccagttgcccttccagtgacggtacaaaccacagcacaggaatgccaattgcgatacctaccagcgtaccaataatccttaacttcaggcggtggcgcgtggcgttatagtttggctggcagacaaacaaacttgtcagcaagatccaatacccgtgatgcattccggttatctgaatgatggcgtagccgaagcacaacaccagcgacattcttaccgcatgacggaagagggcggattccggcgtgaagtgacggctaagacgcagccagatatcactcaatccgtgcgggctgtcatcagcgagctcattttcgtcattattatggggcagtgcctgggcctgttctgattcaattgttgccagttgggcatcaatggcacgtaaattgttcagtaaaaatcccagtgttttgagtaaatcagcaggagcgccgttatcgcgcatccgctccagcgcagcatcaatatgcgtaaaagcgcgctcaaaatgcggatcatgttgataaggctgacgcagcaaaatacagcgtgacagttgctggcacgcctggccctgcatcgacatcagccgctgaaaacggaacagcacgtcgctgtggcgaaaatgttcacgcaatgtttgatattgaatatgagaagagctggcacgctcgtgaatatcctgtgcgacaaagtaataatgcagtgtgcgacgcgttccccgttgaccacgatcgccacgtaagcgggtcagcagcgagagtttcgtctgattcaatgtcgccatcagctgaccgttggcgagagccaaatcgtacagcggtgcctggctttcatcttcaatatcaggatcaaacatgcgcgacttgagctcaagataacgcgccagttgttcatagcaacgcgccaggttgtcctgcagcgggcggaccgggaacagcagatgaccaataagtgtcaggacgttgtaccagacggcaccggccagaagatacatcggctgctgataccagtgctcatacagtgatgttcccaacatagtgtaaatggcgatcagcaatgcaccgaaggcaattgttgcatagcgttgacccagaccgccgagcaaaatgaagccgctggtagagagcgttaagccaatcgcaaatagccagggccagggaaacagcaattctactgaggccgaggcgataaaaaagcagaacagcgtaatgatgaggttacgcaaacgtcccgccagtcggtcatcgagatcggtcagcgccgctgccaccatcccaagcgtcagcggaatcgtcagttttacatcacccagccaccacggaaacgctgtggttccacaaagcgcaataaaaatacgcgcgtaatacagccaggcgctgttccaggtatagcgtttgagcaaaggacttagcataaaggccatattagtggattattggaaacgacgacgtgcattggcttcgcgcgcagcttgcgctgtttctaccgataccacgcgacgaccgaccggccatagtgcaatagcggcaattttaaagttcgcaataccgacaggaatgccaatgatggaaatacattgtgcgatgcccgttgcaatgtgcatcaggcataaccaccagccaaagaaaatcagccagaaaatattcaataccgtaccgccagtatttagcagcacatttttgccagccgggttcagttcatcgacatgaatagcttcattgccataaggcaccagagacagtttagtgatctcccagcaggatcgtgtcagcggtaaggtaaaaatcagcacaatactgaccagagtcgccaacagccagcccagagtggtggcaaatccgccaagcacaaagttcagaatgttcaaaacggtacgcataaaacctcgctttactgtggttttcagtaatgggcggcaattgtaacgtttttttgggctggagcacgttttctctgacggttacactgataagaaataatttcgtgtggatctacagagtcatggaactgaaagcgacaacgcttggaaaacgtctggcacagcacccttacgatcgggcggtgatcctcaatgccgggattaaagtctccggcgatcgccacgaataccttattcctttcaatcaattactggcgattcactgtaagcgcggtctggtatggggcgaactggagtttgtactgccggacgaaaaagtggtgcgtctgcacggtaccgaatggggcgagacgcagcgtttttaccatcatcttgatgctcactggcggcggtggagtggcgagatgagcgaaattgcgtctggcgttttacgtcagcaactggatttgattgccacgcgcaccggagaaaataaatggctgacgcgtgagcaaacctctggtatgcggcaacaaatccgccaggctttgtcggcgttaccattgccggttaaccgactggaagaattcgataactgccgtgaggcgtggcgtaaatgtcaggcctggttgaaagacattgaaggcgctcggttgcagcataatcaggcgtataccgaagccatgcttatcgagtatgcggattttttccgccaggtcgagtcttcaccgctgaatccggcgcaggcccgggcagtcgttaatggcgagcattctttgttagtgctggctggtgcaggaagcggaaaaacgtcggtgctggtggcccgtgcaggctggttgctggcgcgtggtgaagcgtcccctgagcaaattttattgctggcgtttggtcgcaaagccgctgaagagatggacgagcgtattcgagaacgactacataccgaagacattaccgcacgcacgtttcatgcgctggcgctgcatattattcagcagggcagcaaaaaagttccgatagtcagcaaactggaaaatgataccgctgcccgtcatgaactttttattgctgagtggcgcaagcaatgcagcgaaaagaaagcgcaggcgaagggctggcggcaatggctgacggaagaaatgcagtggtcagtgccagaaggtaatttctgggatgatgaaaaattacagcgtcgtcttgcctctcgcctcgatcgctgggtaagtctgatgcggatgcacggtggtgcacaggcagaaatgattgccagtgcacccgaagagattcgcgatctgttcagtaaacgtatcaagttgatggccccgttattaaaagcctggaaaggtgcgctgaaggcagaaaacgctgtcgatttttcgggccttattcaccaggcgattgtgattctggagaaaggtcgctttatcagcccgtggaagcatattctggttgatgaatttcaggatatctcgccgcagcgcgcagcgttgttagcggcattacgcaagcaaaacagtcagacgacgttgttcgccgttggtgatgactggcaggcgatttatcgcttcagcggtgcgcaaatgtcgctcaccaccgctttccatgaaaactttggtgaaggtgatcgctgcgatttagacacgacttaccgttttaacagtcgtatcggtgaggtggcaaaccggtttattcagcagaacccaggccagctgaaaaagccgctaaacagcttaaccaatggagacaaaaaagccgtcacgttattggatgagagccatcttgacgctttgctggataagctctctggttatgccaaaccggaagagcgcattctgatcctggcgcgttaccatcacatgaggcctgccagcctggaaaaagcggcaacacgctggccgaagttgcaaatcgactttatgaccattcatgccagcaaagggcaacaggcggattacgtcatcatcgttggcttgcaggaggggagtgatggttttccggctgcggcgcgggagtcgattatggaagaggcgctactgccaccggttgaggatttcccggacgctgaagaacggcggttaatgtacgtggcgctgacccgggcacgccatcgggtatgggcactgtttaacaaagagaatccctctccatttgtcgaaatactgaaaaatctggatgtgccggtggcgagaaaaccgtaagaaacaggtggcgtttgccacctgtgcaatattacttcagacggtccgcgagataacgctgataatcggggatcagaatatcgaccgcgtcgttgaaatgcggcgactggataatgaagtctgccgttgccacgttggtggcaaccggaatgttccataccgtcgccagacgcagcaaggctttcacgtcagggtcgtgcggcacggcgtttagtgggtcccagaagaaaatcaatacatcaattttcccttctgagatcaatgcgccaacctgctggtcaccccccattgggccactcaacatcgcgttgacgttcatgccggtcgcgcgggaaattaagttaccggtagtgcctgttgcatacagtacgtgttgttccagtaacggttgatgccgttccacccagctcatcagcatttgtttgcagtgatcgtgtgccaccagcgcaatatgtttccgcgaaggtaaagtgcgagtcgtcagttccataatgtacatccgtagttaactttcctacagattactgtaagtacttatcgctgcaagataaagactgaaaaagcctgcgcacaggcacaaaaatctcaggaggatggttgtttttccgcccattgcaggaaagtatttcgcgtttgtgggtcagccagtttaaaccaatacttcagccgttgttctgtgagcacctgagactgcggcggaatagcatccagctcggaaacacccgaaagcagcgtactgtcatctgccatcatcgtggcaaattgcggtagtgaagcgcgtttcgcggatttgttatagcgttcaacctcgacctcataatcaatcgtttttgcagttgaggtaatggcgagaatatccagctttaccggaatcggcgtcgcatcgccatccaacaattcaaggcgcggcgcggcatcaaaatggttagcttcccgctcattctccaggcgaggcaggcgaaaattgacctggttgatgagctgggtattaaaactaaccaccagtggaggggagatatagagccgttcttcactattggaaagatgaatcgtcttctcaacgcgaaacactaactgatgcggtccattgtccagttcaatgctgtccgcaccgcgcagcagagagctggaaaccttcttaccgtcgagtaccagaagatcgacatcagtagaaagccgcagcgtggtggcaaaaacggataccggcaaacataatgcaatcaaggtggtcacgatgccggttttcatagatagctcctgttaaaagaccgcccgaataataatgtgtcaaaatttttctttaatcatacttactaacatatagacatatttcccgcttttgctctcattcattcgtattagctgcatggttggcatgtcggctttgtcgtacactttgttaaacagtctggaggaaataatgaaagaaaccgatattgcaggcattttaacgtccactcacaccattgcgctggtgggggcaagcgacaaacccgatcgtcccagctatcgtgtgatgaaatatctactcgaccaggggtatcacgtcattccggtttcgccaaaagttgctggcaaaacactgctgggccagcaggggtatggcacgctggcagaagttcctgaaaaagtcgatatggtcgatgttttccggaattcagaagcggcgtggggcgtagcgcaggaagcgatcgccatcggcgcgaaaaccctctggatgcaactgggggtgattaatgagcaagcggcagtactggctcgggatgccggattaaatgtagtgatggatcgctgcccggctattgagatccctcgcctgggcctggccaaataaaaaatccccggaaggcaaaaaccttccggggatttgttcagggattagttacgcagacgcggggcctggagttgtttgcggatggtctgcgccagctcatccatggatggctgttcaggatgttcatcctgcaattcgctacttagctgggcttcagccaggtaggtatgaaccggtaggccgttatcatcctccatcaccacgtgataccacggagcggcgcgaagctcgtcattcaccgccagctcatcaggcgacggttcagagagcgaataaaccgggtcgatatccacgaccactccgagataacctaacagggaatggcggacctgctggccgataccgaatttgctggcaatcatagtcacctcccgggaaatctttacctttgatataagggtaaaattccacatttcaagttacatgacgcgacaggcaaaccctttcagatatagcccttccgggtaggtagcgatcaccggatgatcggctgcctgacggaactgctctataaattgtacatcacgaccggcatcaattgcggcatccgcgatgattttctgaaataaatcgctggtcatcagaccggaacaggagaaagtcaggagaataccgccttcattcagcaactgaatcgccagcatgttgatgtctttataaccacgacacgcgcccatcaactggcttttattctcaacaaacttcggcgggtccatcacgataacatcaaatttttcaccgcgatcgcgataagtacgcagcaatttaaagacatcatcacggacaaactctgccttgctcagatccagtttgttcagctcaacgttctgccgtgcaatatccagcgcttcgtgggaggtatcaacgctgacaacctggctgcaaccgcccatcaatgccgatacggcgaaaccaccggtataggaaaaacagttaagtacgcgtttattttcgacgtagcggcgggtagccaggcggctgtcacgctggtccaggtagtagcccgttttgtgtccgtgctgaatatccaccagcagtttcatgccgtgttcttcaatcggcagcagggcaggcggcaactcgccggtgatggggccctgagtcagctccatcccttcttttttacgtaccgcgacgtcgctgcgatcgtaaatagcacattccgggtacagcgtttgcagggcgctaattaatgccgcgcgctgatactctgcgccagcactcagcagttgcagcaccagaaaattaccgaaacgatcgatagtaatacccggcaggccatcagattctccggcgattaaacgatagctgtcgaggccatctttttgcgccagccagtcacgccatttttgtgcttgctgcaaacggcgggtaaaaaaagcaatgtcgatagactctgacgggtcaaacgtccagacgcgcgcccggatttgcgaagctggcgaataagcgccgcgtgctaaccattttccctgatgatcaacaatatcgatggtttcaccgaggctggctttaccttccatgcgggcaacggccccggaaaagacccacggatggcgacgaagtaatgatttttcgcgccctttggctaacactaaacgtacactcataatttacttttctgtcgatgcaaagaaatgggcgtcattgtccggagttttccatggatttgcaacgcgtccattaaggataaggagagcagcaatgtcgaaagtctgcataattgcctgggtttacgggcgagttcagggcgtaggattccgctacaccacgcagtacgaagcgaaaaaactgggactaaccgggtacgccaaaaatcttgacgatggcagcgtggaagtggttgcctgcggtgacgaagggcaggtggaaaaattaatgcagtggttaaaaagtggcggcccgcgttcagcgcgtgtggaacgggtgcttagcgagccgcatcatccctccggggagttaacggattttcgtatccgttaaatgcattttaccggtttaggcaggccagcaattttggtggcttgctttgccggacctttcgggaacagtcggtacagatagcggctattgcctttctcttcgccaaatttattcgccatcgcttttaccagcatacgaatcgccggagaagtattgaattccagatagaaatcacgcacaaaacgcaccacttcccagtgttctggcgacagcgcaatcccttcgttctctgcaatcaccaccgccagtggctcactccactggctgctttctttgagatagccttcggtatccgtttctatctctttaccttcgaagatcagcataattctttactaccttaatcagactggcggcagtgtaacaaaaaacaaagccccgcataaagcgaggctatgaaagtgttagcgggtgagattaatcgcggctggcgaagcccagaatgctcagcaggctgacgaagatgttgtacagcgaaacatacaggctaaccgtggcacgaatatagttcgtttcaccgccatgaatgatgttgctggtttcaaacaaaatagcgccagaggagatcagaatgaagaccgcgctgatcgccagatgcagggcaggcagctgcaggaagatattagcaaccataccaatcagcaccaccacaatacccgccatcagcataccgccaaggaacgacatatctttgcgggtggtcagcacatacgcagagcagcagaagaacaccaacgccgttccgcccagtgccatagcgattacgtcacccattccagcagacaggtaggtgttcagaattggtccgaggatatatcccagaaaaccggtaaaggcgaatgcggagataatcccggtcggcttattcgccgttttgtaggtcaggaacatcaaaccatacatacccaccagcgtcagaatcagacccggagatggcagcatcagcaccgtactggcagttgcggtaatcgccgaaaaggccagcgtcaggctcagcagaaaataggtattacgcagcaccttatgggtgctaagcagcgatgtacggtcatgtgaagaactaactatacgatccattgagtcactctctatgacagatgtaattaattaagcagcataatgataatgtgggaaggtacacagaagttttacccatctttacgcatttgatctggaacaggtttaacagcggattatcaggtcattaagcaaatataacgccctgagaatttcgacaggcaaaagaaaaaggggttagcatttagctaaccccttatcttatttggcggaagcgcagagattcgaactctggaaccctttcgggtcgccggttttcaagaccggtgccttcaaccgctcggccacacttccggaatgacgcgcactataaacatcccgatgcggcgtgtaaacccctaatttgtttgtttgcctgaaaaacagccaaaagtgcattgttagcgtgaaataacagcagattgatcatttcatcaccatgaattccttctcttttactcgtttagcaaccggttaaacatcctcaccgcccggcaaaaagaaaaataggtccatttttatcgctaaaagataaatccacacagtttgtattgttttgtgcaaaagtttcactacgctttattaacaatactttctggcgacgtgcgccagtgcagaaggatgagctttcgttttcagcatctcacgtgaagcgatggtttgccttgctacagggacgtcgcttgccgaccatgtgcgcccggtgtcctgccggtgtcgcaaggagaagagacgtgcgatatgaataacgaggaaacattttaccaggccatgcggcgtcagggcgttacccggcgcagctttctcaaatattgtagtctggctgccacgtcgctgggattaggcgcgggaatggcaccaaagattgcctgggcgctggagaataaaccgcgcattccggtggtatggatccacggtctggaatgcacctgctgtaccgaatcttttatccgctccgctcacccactggcgaaggacgtcatcctttccctgatttccctcgattacgacgatactttgatggctgccgccggaacccaggcggaagaagtctttgaagacatcatcacgcaatacaatggcaaatatatcctcgccgttgaaggtaatccgccgctgggcgagcaggggatgttctgtatcagcagcggtcgaccgtttattgagaaactcaaacgtgccgctgccggagccagtgcgattatcgcctggggaacctgcgcgtcctggggctgcgtgcaggccgcgcgacccaatccgacgcaggcaacgcctatcgacaaagtcatcaccgacaaacctattatcaaagtacctggctgcccgccgatcccggatgtgatgagcgccatcattacttacatggtgacctttgatcgcttgccagatgtcgacaggatgggccgtccgttgatgttctatggtcagcgtatccacgataaatgctatcgccgtgctcacttcgacgccggagagttcgtccagagttgggatgatgacgctgcccgcaaaggttactgcctgtacaaaatgggctgcaaagggcctaccacctataacgcctgttcctccacacgctggaacgatggcgtttccttcccgatccagtcaggtcacggctgcctgggttgtgcggaaaatggtttctgggatcgcggttcgttctacagccgcgtggtcgatattccacaaatgggtacccattccaccgccgacaccgtcggtttaaccgcgcttggcgtggtggcagcggctgttggtgtgcacgcagtcgccagcgccgttgaccagcgcagacgtcataaccagcaacctacagaaaccgaacatcagccaggcaatgaggataaacaggcatgagcactcagtacgaaactcagggatacaccatcaacaatgccggacgccgcctggtggtcgacccgattacgcgcattgaaggccacatgcgctgcgaagtgaatattaacgatcagaatgtgatcaccaatgccgtctcctgcggcaccatgtttcgcgggctggagatcatcctgcaagggcgtgacccgcgcgatgcgtgggcgttcgttgaacgtatctgcggcgtctgtactggcgtacacgccctggcttcggtttacgccatcgaagatgccatcggtattaaagtgccggacaacgccaatatcatccgcaacattatgctggcaacgctctggtgccacgatcatctggtgcacttctatcagcttgccgggatggactggatcgatgtgttagatgcgctgaaagccgacccgcggaaaacctccgaactggcgcaaagcctctcctcatggccgaaatcatcccctggctatttcttcgacgtacaaaaccgcctgaagaaattcgttgaaggcgggcagttggggatcttccgcaatggctactgggggcacccgcagtacaaactgccgccagaagccaacctgatgggctttgcccactatctcgaagctctcgatttccagcgtgaaattgtcaaaatccacgcggtctttggtggtaaaaacccgcatccaaactggattgtcggagggatgccttgcgccattaacattgacgaaagcggcgcagtcggggcggtcaatatggaacgcctgaacctggtgcagtcgatcattacccgtacggcggacttcattaacaacgtgatgatccccgacgccttagccatcggccagttcaacaaaccgtggagcgaaatcggcacgggtctttctgataaatgtgtcctcagctacggcgcattcccggatattgccaacgactttggcgagaaaagtctgctgatgcctggcggcgcggtgattaacggcgacttcaacaatgtgctgccagtggatttggttgatccgcagcaggtgcaggagtttgtcgaccacgcctggtatcgttatcccaacgatcaggtcgggcgtcatccgttcgatggcatcaccgatccgtggtacaaccccggcgatgtcaaaggcagcgataccaacattcagcagctgaatgaacaggaacgctactcgtggatcaaagcgccacgctggcgcggtaacgcgatggaagtggggccgctggcacgcacgttaatcgcttatcacaaaggcgatgctgcgaccgttgagtcggtcgatcgtatgatgtcggcgttgaaactgccgctttccggcatccagtcaacgttgggccgcattttgtgtcgcgcgtacgaagcgcagtgggccgcaggtaagttgcagtatttcttcgataagctgatgaccaacctgaaaaacggcaatcttgccaccgcttccacggaaaaatgggaaccagcaacctggccgacagagtgccgtggtgtcggttttaccgaagcgccgcgcggggcgttaggccactgggctgccattcgcgatggcaagattgatctctatcagtgcgtggtgccgaccacctggaacgccagcccgcgcgatcccaaagggcagattggcgcttatgaagcggcgctgatgaacaccaaaatggcgatccccgagcaaccgctggagatcctgcgtactctgcacagctttgacccgtgcctcgcctgttcaacacacgtgctgggcgatgacggtagcgagcttatctccgtgcaggtgcgttaacagcgaaggagaatcatcatgcaacagaaaagcgacaacgttgtcagtcactatgtctttgaagcacccgtgcggatatggcactggctgacagtgttatgcatggcggtgttgatggtcaccggttactttatcggcaagccgctaccttccgtcagcggcgaggcgacgtatctgttctatatgggctacatcaggttaattcacttcagtgccgggatgatttttaccgtggttttgctgatgcggatctactgggcttttgttggcaatcattactcccgcgagctgtttatcgtgccggtatggcgtaaaagctggtggcagggcgtgtggtatgaaatccgctggtatctgtttctggcaaaacgtccgagtgccgatataggccataaccccatcgcccaggcggcgatgttcggctatttcctgatgtcagtttttatgatcatcaccggctttgcgctgtacagcgaacacagccagtacgctatttttgcgccgttccgttatgtggtggaatttttctactggacgggtggcaactcaatggacattcacagctggcatcggctggggatgtggctgattggcgcgtttgtgatcggtcatgtctacatggcgctgcgtgaagacatcatgtccgacgacacggtgatctccactatggtcaacggctaccgtagccacaaatttggcaaaataagtaacaaggagcgttcatgagcgagcaacgcgtggtggtaatggggctgggcaacctgctgtgggccgatgaaggcttcggcgtgcgggtggcggaacggctgtatgcccattaccactggcccgaggatgtggagattgtcgatggcggcacccaaggactgaacttgctggggtatgtcgaaagcgccagtcatctgttgattctcgatgccattgattacgggctggaacccggaacgctacgaacgtatgccggagaacgcattccggcttatctcagcgcgaagaaaatgagcctgcaccagaacagtttctccgaagtgctggcgctggcagatatccgcggacatctgccagcacatattgccctcgtcggtttgcaacccgcgatgctcgacgactacggcggcagcctgagcgaactggcgcgggagcaactgcccgccgcggaacaggcggcgctggtacagctggcggcctggggaattgtgccgcaaccggctaatgaatcgcgctgtctcaattatgactgtctgtcgatggaaaattacgaaggcgttcgcttgcgtcagtacaggatgaggctggaggaacagggatgagcaacgacacaccatttaatgcgttgtggcaacgaatgctggcacgtggctggacgccggtcagtgaatgccgtcttgacgactggcttacgcaagcgccagacggcgtggtgttattaagcagcgatccgaaacgcacgccagaagtcagcgataacccggtaatgattggcgaattactgcgcgagtttcccgactatacatggcaggtagcgattgctgatcttgagcagagcgaagccatcggcgatcgctttggcgtctttcgctttcccgccacattagtgtttaccggcggaaactatcgcggcgtgctgaatggtattcacccgtgggcggaactgataaacctgatgcgcgggcttgtcgaaccgcaacaggagcgtgcttcatgagcgaaacttttttccatctgctggggccaggaacgcaaccgaacgatgacagtttcagcatgaatccactgccgatcacctgtcgggtgaatggtgaaccgagtatggctgccctggagcaatgtgctcacagcccgcaggtgattgcgctgttaaacgagttacaacatcaactaagcgaacgccagccgccgctgggtgaggtactggcagtcgatctgttaaatctcaacgccgacgatcgtcactttatcaatacgcttctcggggaaggggaagtgtcagtgcgcattcagcaggctaacgacagtgaaagtgaaattcaggaggcgatcttctgcggattatggcgggtgcgcagacgtcacggcgaacagttgctggaagacaaactggaggctggctgcgcaccgctggcgttgtggcaggcggcaacgcaaaacgtcttgccgacagattcgctgttaccgccgcccattgatggcctgatgaatggcctaccgttggcccatgaattactggcacatgtacgtaaccccgacgcgcagccgcacagcattaatctgactcaattacccatcagcgaagctgaccggctttttctctcacgtctctgtgggccgggaaatattcagattcgtaccattggctatggcgagagctatatcaacgccacggggttacgccatgtctggcatttacgctgtacggacaccttaaaaggcccgttactggaaagttatgaaatctgcccaataccggaagtggtgctggcagcgccagaagatttggtcgactctgcgcagcggcttagcgaggtatgccagtggctggcggagggggcaccgacgtaaaaagacggtaagtatcgctttcaggcttatgaatatcgcaatcggcgaatacctctggtcgtagagtttcaggataaagagggagatctaccattaacgggttatttttctctcttcgcctacaggagtgcgcatgtgggatgtcattgatttatcgcgctggcagtttgctctgaccgcgctgtatcactttttatttgtaccccttaccctggggctgatttttttgctggctatcatggaaaccatttacgtggtcaccggcaaaacaatctaccgcgatatgacgcgcttctggggtaagctcttcggtatcaactttgctcttggcgtggctaccggcctgaccatggagtttcagtttggtactaactggtcattctattccaactatgtgggcgatatttttggcgcaccgctggcgatggaagcattaatggccttcttcctcgaatccacctttgtcgggctgttcttcttcggctggcagcggctgaataaataccagcacctgctggtgacgtggctggtggcgttcggttcaaatctctctgcgttgtggatattgaatgccaacggttggatgcaacacccgactggtgcgcattttgatatcgacaccctgcgtatggagatgaccagtttcagcgagctggtctttaacccggtcagccaggtgaaatttgtgcacaccgtaatggcgggatacgtgaccggggccatgtttattatggcgatcagcgcctggtatttactgcgcggacgggagcgcgatgtcgcattacgctcgtttgccatcggttccgtcttcggtactctggcgattatcggtacgctgcaactcggagacagttctgcgtatgaagtcgcgcaagtacaaccggtaaaactggcggcgatggaaggtgagtggcaaacagaacctgcacctgcaccgttccatgtggttgcctggccggaacaggatcaagagcgtaacgcctttgccatcaaaattcccgcgctgctagggatcctcgccactcactcattagataaacccgtgccgggtctgaagaatttgatggctgaaacctacccacgcttgcaacgcggacgtatggcgtggctgttaatgcaggaaatatcgcaaggcaatcgtgagccgcatgtgttgcaggcattccgggagctggaaggcgacctgggttacggcatgttgctctcccgctatgcgccggatatgaatcatgtcacagccgcacagtaccaggcggcgatgcgtggcgcgatacctcaggttgcgccggtattctggagtttccgcatcatggtgggctgtggttccctgctgctactggtgatgctgattgcgcttgtccagacgctgcgtggcaaaatcgaccagcatcgctgggtgctgaaaatggcgctctggagtttgccgctgccgtggattgcgattgaagccggatggtttatgaccgagtttggtcgtcagccgtgggcgatacaagacatcttaccgacatactccgcgcactccgccttaaccacaggacaactggctttctcactgatcatgatcgtagggctttacaccctgttcttaatcgccgaagtctacctgatgcagaaatatgcccgtctggggccgagcgcgatgcagagtgaacaaccgacgcagcaacaggggtaaaggagaaaatcatgtttgattatgaaacattgcgcttcatctggtggctgctgattggcgtgatcctggtggtctttatgatctccgacggatttgacatggggatcggctgtctgctgccgctggtggcgcgtaatgatgatgaacgtcggatagtgataaacagcgttggcgcgcactgggaaggtaatcaggtctggttgatcctcgcaggtggggcattatttgccgcctggcccagagtgtatgcagcggcgttttccggcttttatgtggcgatgattctggtgctgtgctcgctgttcttccgcccgctggcctttgattatcgcggaaaaatcgccgatgcacgctggcgtaaaatgtgggatgccggactggtcatcggcagtctggtgccgccggtagtcttcggtattgcattcggcaacttgctgctcggcgtgccgtttgctttcacaccgcaattacgcgtggaatatctcggcagcttctggcaactgctgacgccattccctttattgtgtggattgctcagtcttgggatggtgattttgcaaggtggcgtctggttacaactgaaaactgttggtgtgattcatctgcgttcacagctggcgaccaaacgcgccgcactactggtgatgctgtgctttttgctggcgggttactggctgtgggttggtattgatggctttgtactgctcgcccaggatgctaacggtccttccaatccgttaatgaaactggtggcagtgctacctggtgcctggatgaataatttcgtcgaatcgcccgttttgtggatcttcccgctgctggggttcttctgcccattgctgacggtgatggcgatttctcgtggtcgcccgggttggggatttttgatggcgtcattgatgcaatttggcgtgattttcacggcaggcatcacgctgttcccctttgtcatgccgtcaagcgtgagtccgatctccagcctgacgttgtgggacagcacttccagtcagctgacgctgagcattatgttggtaatcgtgctgatatttttgcccattgtgttgctctacactctctggagctactacaaaatgtgggggcgcatgacgacagaaactctccgccgtaacgaaaacgagctgtactaaggagcaggaacaatgtggtatttactttggttcgtcggcattttgttgatgtgttcgctctccacccttgtgttggtatggctggacccgcgtctgaaaagttaacgaaggtaagcctgatgaggcgcattagcgtcgcatcaggcaatcaataatgtcggatatgaaaagcggaaacatatcgatgaaagcgatcttgatcccattcttatctcttctgattccgttaacaccgaaatctgcattcgctcagagtgagccggagctgaagctggaaagtgtggtgattgtcagtcgtcacggtgtgcgtgcaccaaccaaggccacgcaactgatgcaggatgtcaccccagacgcatggccaacctggccggtaaaactgggttggctgacaccgcgcggtggtgagttaatcgcttatctcggacattaccaacgccagcgtctggtagccgacggattgttgacgaaaaagggctgcccgcagcctggtcaggtcgcgattattgctgatgtcgacgagcgtacccgtaaaacaggcgaagccttcgccgccgggctggcacctgactgtgcaataaccgtacatacccaggcagatacctccagtcccgatccgttatttaatcctctaaaaactggcgtttgccaactggataacgcgaacgtgactgacgcgatcctcagcagggcaggagggtcaattgctgactttaccgggcatcggcaaacggcgtttcgtgaactggaacgggtgcttaatttcccgcaatcaaacttgtgccttaaccgtgagaaacaggacgaaagctgttcattaacgcaggcattaccatcggaactcaaggtgagcgccgacaatgtctcattaaccggtgcggtaagcctcgcatcaatgctgacggagatatttctcctgcaacaagcacagggaatgccggagccggggtggggaaggatcaccgattcacaccagtggaacaccttgctaagtctacataacgcgcagttttatttgctgcaacgcacaccagaggttgcccgcagtcgcgccaccccgttattggatttgatcatggcagcgttgacgccccatccatcgcaaaaacaggcgtatggtgtgacattacccacttcagtgctgtttattgccggacacgatactaatctggcaaatctcggcggcgcactggagctcaactggacacttccaggtcagccggataacacgccgccaggtggtgaactggtgtttgaacgctggcgtcggctcagcgataacagccagtggattcaggtttcgctggtcttccagactttacagcagatgcgtgataaaacgccgctgtcattaaatacgccgcccggagaggtgaaactgaccctggcaggatgtgaagagcgaaatgcgcagggcatgtgttcgttggcaggttttacgcaaatcgtgaatgaagcacgcataccggcgtgcgctctccatcaagataaataaacatttgccgctgttggtccacgcaggccatttacgcggcaaaattccacgcgtaatcctggtataagcacttctgcgtcgcggggagtgaatgcggaaatatggacctggacttctttacgaccgtcggaggggataatgaatcctttgccgcttttgcgatcaaaggttttgacaattcctgtcattttacgggacaaacaaattccttactgaaaatactgcgctgcactatacggggttaataaaataaagccagcgatatttaagaccgccggacggctaaaataaaatttgcttaatctcaattatcatgcgttaatagctgcgtcggtttgaaagacagacagcatacaaagtagtttactaaagcagttctcattatcaggcattatccccttcttttgagtctctctcctgaacactaagtagtttctgtattaaagccctgtttgccgaaaggcccaaaatgaaggaagtaaaatatgtctaataaaatgactggtttagtaaaatggtttaacgcagataaaggttttggctttatcactcctgatgatggcagcaaagacgttttcgtccatttcactgccatccagagcaatgaattccgcacgctgaacgaaaatcagaaagttgaattttctattgagcaggggcaacgtggtcccgcggcagcgaacgttgttacgctctaaggttgccgttattactcaacatctccatttccgctgtccatgttgccatggttcacagtaccgcacatcggcattcgatgtgacggagcgaaatcctttaggagcaaagtgcattttttgtaaatcgacgatgatcacctttgataacgtcgcgctgcaaatacgcactgaccatgcgccgctggatttcacaaaataatatcaggctccctcgtggagccttttttatatctgccttatttttcttcaacgctgtatgtatagtaagcgataacctgttgattattgaatctttcggggagatggcttataacatttcttacctgaccagggtaccgggaaccaacaccttactggcgtgttgctgtcttttaagaccagaagaggttaacagtgaatattgaagagttaaaaaaacaagccgaaacggaaatcgccgactttatcgcgcaaaaaatcgccgagctgaacaagaatacagggaaagaagtctctgaaattcgcttcaccgcacgagaaaaaatgaccgggcttgaaagttatgatgtcaaaatcaaaataatgtgattttgtgaacatcaccccgtgcgaggtgatgttccgcttgttgctaatttagtgaccaatcattggcgattgcggaattaagcgttggtacaattcctccggcaccgggctttgccatactcccgcatagattgcgtaaccaatcgccgcaaacataatccccataaccagtagcgtcattaaccagccagacaacgcaaaggcttttttatttgccgcaggtttttgcagtgaaaaggtcaatgttgaggctaccggacatgactctacgcaagtcatacagccggtacattccactgttcgtacctgaattaatttatcgaccgggatccgtgatgggcaactttttgcgcatttgccacaatcgatacaactttcggcattgcgacgaatcttaaacggcgataatagcgaaaccacgcccatcagcgcgccatatgggcaaagataacgacaccaggcatggcgaataaacaggctggcaatcagcaaaacgatcatgctgattaatgtcgcggtccccatatgacgaaagaaatcgagcattttaacgtccatcaccacgctgtagggcgacaacataaaatagtgaatcgcctgagcgggcatcaataacgcgatatagagaaaaaaactcaacagcaaatacttcacgccgcgcagaggaatatccagccagcggggaaggacaaattgccgaccaaacagtttgttaccgagatcgccgattaattccgaaagcgtaccaaccgggcataaccatgaacaaaaggcctttttgagtaatagactgatgacgataaaagcgaccaataacagcatcgcggcggcgtggacggacggtaactgacctgttgcaaggctatatttcagattcatcagaccggcaatcggtagccagccttcgatacctcccggtctggcgacaaatgtcgtactacctgccgtttcgtaatagcgcacccaataccagaacgtgatggcaatataaatattaattgccaacagtaataattgcgtcgctttacgccaggtcgtggcattgcgccagtcattccacggtaatttgccgcccgtcgtgcctggccgccgctgccagcgggttctttttttctctgccatgattttgccagtccgttaagttgcataccaaatgccactattctagttgttcttaactggctgatattgattcaaattgcgttcaggtctttcttattaaccatgcttccagagcggcaacactgcgtgtaatttcttcgtgtggaaggggggcagataatggctgctgctccagttgtgcgcattgctggctggcgctacgcattcccagactcgagcaactgctttttagctgatgtgcggcacgctttattttctcgttatcctgactggcgcgggcaatgtcgatttcatcgagaagcggcagggcatgttgtttaaataatatcagccattcgtggatcttctccgcccccattaaatgagcatcttcattgagttgcgatacatccagtggttgatcgttattgacttgcagttggagatagtgcgccagtaattgaccgagcacttcacgcggcaccggtttagggataatcccgcgaaatagcgagctggtacgctgtcgcagtgtttcgtcaatgacatgggcgctaaagccaatcaaaaccagtgacggatattgctgtgccagttgccgggcaagggtaatgccgtcgatatccggcagatcaaaatccaccagtgcggcagcaaacggttcgctattttgcaatgcctctattgcctgcgcggcatttcctactgcaacgacctgcgcaccactggtgttcagcatttcgacagtaattcgctgggtgagcgggttatcttcaattaacagcaaacgcaaatcgtccagacgtaccgcctgattgactgttttgggcacgggtgcagtggcaatacgtaacggcaagcgtaaacaaaaacagcttccaacctccggcgtgctggtggcgctcagttcgccacccatcgcctgggccagacggctactgatagtcagccccagcccggtgccgccgcgtttgccgctaacctgaacaaatggctggaagatttcagccagtttcgcgggatcaataccgcagccgctgtcttccacttcgaccagccattgttcgccatcagtgcgactacgcagaataatgtgcccttcgtcggtgaaacgcagggcgttgctcaacaggttggtaatgacctgacgaatacgccgcggatcgcccattaacgcagtcggtacatcgtcggcaatttctgttgccaggcgaatcgggcgacctttcacccttccgctcattaattgcagggtactttccagcagcgggcgcggttcaaagggttcatcgctgaccgaaacattcttgccgcctgcttcgatagccgaataatcgagaatatcgttgaggatggtcagcaacgattcaccagagtcggtaatcgcccgcaaatcatcgcgctgggcgttaagtgcggggttatctgccagcagttgcgcggtgccgagaataccgtacagcggtgtgcggatctcatggctcatcgccgccagaaacgccgattttgcctggctggctttttctgcttccgcccgtgcctgtcggtgttctatcaccagttcctgcaattcagctgtacgcgctttgacctgcgccgccagctgttcgcggtggcgattcagtgcatgaacactgctgcgaaacgcatccatcagccgcccgatggtgtccagttcccgcacgccagcggtttccgggaaaggggagtcgatatcaccatccagcaagcgttgcagcgcctgcgtttgttctgcaagagggcgcgtgactgagcgataaaccacgcgccagaggatcagaatcagtgcgcaaagagaaactaatcccagcaataacaggctgtattgcccgcgtgcactggctttttccagatgtgccagcccgtgctgattacgcagctcaatggtgtcgaccagctgactgacttcgctactaaactgcgcgaattgggcgatgttattttgggcgagagtttgcaggtgattgctgatttcactgtcctgctgatacagcgccagcaaatcgctatattggctaacggtagttaacgttgttgctacctgagtacgaacacccggatcttcaatgcgtatttgccgacgttgcagaattttcaccgcattattgagctgcttttccagcgttggcgcatttttctggatctgttccagccccagattcatcaccatttgctgcacccgcagggcgctaaggcgcagttcattcatctggttaacatactcaagatcgatatcaatcagccgatcgagtgcactttctgcggcctgacgctgatgttgttcgatcaaatcgtaaatcccggcctgggtcgctccggcggaggttgccgcattattcgcctgaccttgcgccaggcgtgcgatttcatcggcggcggcgactatctgctgactgagttgctgttgttgctggcgaagttgcaaacgctgccccaccagttccccttgctgacgtaacgaacgggagatctcctgctcctgttgttcaatagcggtggtgtcaaaaccttgttcccgtaacgcttgcagcaacgcattaatcttcaggctttgtgcggtgagcattcgcccctgcgcctgccacatcttttcgttatcggcactggtcaggttctgcgcggcgaaaagttcccaggcgctggcttcgctcaactggcgcgccatattcatggtaggaatcaatgcctgagtgttgtctttttccacctggctgataaagcgcaggttgtaccatcccaccagggtactggtcagggttaacagcgccatcagggcaaagcccatccagagtcttcgggtcagggttaaattcacggtcggtgcactttaggtgaaaaaggttgagtcgcaaagcagaatgcatctagcataaagccttattattgatgaggctatcatgcgcgtactgctatttttacttctttcccttttcatgttatcggcattttcggctgataacctgttgcgctggcatgatgcgcagcattacacggtgcaagcctctacgccgcttaaagccaaacgcgcatggaaactgtgcgcgctttatcccagcctgaaagattcatactggttatcgttgaactatggtatgcaggaggctgctcgccgctacggtgtggatttaaaagtgctggaggcaggcggctacagccagttggctacgcagcaagcacaaatcgaccagtgtaaacagtggggcgcagaggccattttgctcggtagtagcacgacgtcatttcccgatctgcaaaagcaggtagcaagtctgccggtgatcgaactggtgaatgctattgatgctccccacgtgaaaagccgcgttggtgtgccctggtttcagatgggctatcaaccaggacgatatctggtgcaatggagccacggtaaaccactgaacgtgctgttgatgcccggacccgataacgccgggggcagtaaggagatggtcgagggttttcgcgcagccattgccggaagcccggtacgtattgttgatattgcgcttggcgataacgatattgaaatccagcgtaacctgttgcaggagatgctggagcgccatccagaaatcgacgtcgttgccggaacggccattgcggcagaggcggcaatgggggaagggcgtaacctgaaaacaccgcttaccgtggtgtcgttttatctttcacatcaggtgtatcgcgggctgaagcggggaagagtgattatggctgccagcgatcaaatggtctggcagggggaactggcggttgagcaggccatcaggcaattacaggggcaatcggtgtctgataatgtcagcccaccgattttagttctgacgccgaaaaatgccgaccgcgaacatatccgccgctcgctgtcaccggggggatttcgtccggtctattattatcagcacacatcagcggctaagaaataaccttcgccatgttgtgtcaccagtaaatccgcgctgagtttatggcgtaaacgacgaattaacacatcgacggtgcgcaggtcagggttttccacccgacgcgcagaaagcatacgcagcagacgttcacggctgagaatttcgcccggattagtcacaaatgccaccagcatttcatactctgcgcgggtcagtttaatcggctcgccatcccgctccagcgtatggcgcgacacattcaggcaataaccggcaaagcgatagcagttgtcctgagtgtgcggttgcgcctgtcgcgcgaggtcgattcgccagagcaaatttttcactcgtaccaccagttcgcgcagctccagcggtttggtgacgtaatcgtctgcgcccatttccagcccaacaatacggtcaatccgatcgctgcgtccggtaaccagaataatccccaccgttgagcgttctcgcagggcgcgggttaacatcaggccattttcatcgggcaaattgatatccagcagaatcaaatccaccggctgattctgcataatttcccgcagcccggcaccgctcgccgtaacggaaacggtatacccctcctgagtgaagtaagattgtaatcgcgcctgggtaaccggctcatcttcaacaataacaatgtgatgtggcatcagagggttttactcattctgttcatatctgttcatattctgccgtaagccgttcatcctgaccagtgccgctgttcatatttgctcattaagatcgcttcactaaaccataattttacaggggctattatgcggaaactctggaacgcgttacgccgacccagtgctcgttggtcggtactggcgctggtcgctactgggattgtgattggcattgcgctgattgtattgccacacgttgggatcaaagtcaccagcacaaccgaattttgtgtcagttgccacagtatgcaaccggtgtatgaagaatataaacagtcggtgcatttccagaacgcctccggcgtgcgagctgaatgccatgactgtcatattccgccggatattccaggcatggtgaagcgcaaactggaagcgagcaacgacatttaccagacctttattgcccactccattgatacacctgagaaatttgaagccaaacgcgcggaacttgccgagcgtgaatgggcgcgaatgaaagaaaacaactcggcaacctgccgctcctgccataactacgatgcgatggatcatgcgaagcagcatcctgaagcggcgcgtcagatgaaggtggcagcgaaagataatcaatcttgcatcgactgtcataaaggtattgcccaccagttacctgatatgagtagtggcttccgtaagcagttcgatgagctgcgcgccagtgctaatgatagtggtgacacgctgtactccattgatattaagccgatttatgcggcgaaaggcgataaagaagcgtctggttctctgctgcctgcttcggaagtgaaagtccttaaacgtgacggcgactggctgcaaattgaaatcactggttggacggaaagtgcaggacgtcagcgtgtactcacccaattcccaggtaaacgcatctttgttgcctcgattcgtggtgatgtgcagcagcaggtgaaaacactggagaaaaccaccgttgccgacaccaataccgagtggagcaagttgcaggctactgcgtggatgaagaaaggcgacatggtgaacgatatcaaaccgatctgggcttatgcggattctctgtacaacggcacctgtaaccagtgccatggcgcaccggaaatctcccactttgacgctaacggttggatcggcacgctcaacggcatgattggctttaccagcctcgataaacgtgaagaacgcaccttgttgaaatatctgcaaatgaatgcgtctgacaccgcaggtaaggctcacggcgataagaaggaagaaaaataatgaacaataacgatctctttcaggcatcacgtcggcgttttctggcacaactcggcggcttaaccgtcgccgggatgctggggacgtcattgttaacgccgcgccgtgcgactgcggcgcaagcggcgactgaggctgtcatctcgaaagagggcattcttaccgggtcgcactggggggctatccgcgcgacggtgaaggatggtcgctttgtggcagcaaaaccgttcgaactggataaatatccgtcgaaaatgatcgccggattgccggatcatgtacacaacgcggcgcgtattcgttacccgatggtacgcgtggactggctgcgtaagcgccatctgagcgacacctcccagcgcggtgataaccgttttgtgcgcgtgagctgggatgaagccctcgacatgttctatgaagaactggaacgcgtacagaaaactcacgggccgagtgccttgctgaccgccagtggttggcaatcgacggggatgttccataacgcttcggggatgctggcgaaagctattgccttgcatggtaatagcgttggtacgggcggagattactctaccggtgctgcgcaggtgatcttgccgcgcgtggttggctcaatggaagtgtatgaacagcaaacctcctggccgctggtattgcagaatagcaaaaccattgtgctgtggggctccgatttgctgaaaaaccagcaggcgaactggtggtgcccggatcacgatgtttatgaatattacgagcagttgaaagcgaaagtcgccgccggtgaaattgaggtcatcagcatcgatccggttgttacatccacccatgagtatctggggcgcgagcatgtgaagcacattgcggttaacccgcaaactgacgtgccgctgcaactggcgctggcgcatacgctgtacagtgaaaacctgtacgacaaaaacttcctcgctaactactgtgtgggttttgagcagttcctgccgtatctgctgggtgagaaagacggtcagccgaaagatgccgcatgggcagaaaaactgaccggcattgatgccgaaaccattcgtgggctggcacggcagatggcggcgaacagaacgcagattattgctggctggtgcgtacagcgtatgcagcacggtgaacagtgggcgtggatgattgtcgttctggcggcgatgctggggcaaattggcctgccaggtggtggttttggttttggctggcactataacggcgcaggcacgccggggcgtaaaggcgttattttgagtggtttctccggctctacgtcgattccgcctgttcacgacaacagtgactacaaaggctacagcagcaccattccgattgcccgttttatcgatgcgatcctcgaaccggggaaagtgatcaactggaacggtaaatcggtaaaactgccgccgctgaaaatgtgtatttttgccggaactaacccgttccatcgccatcagcagatcaaccgcattattgaaggctggcgcaagctggaaacggttatcgccatagataaccagtggacctcaacctgccgctttgccgatatcgtgctgcctgcgaccacgcagtttgagcgtaacgatctcgaccagtacggcaaccactccaatcgtggcatcatcgccatgaaacaggtcgtgccgccgcagttcgaggcgcgcaacgactttgatattttccgcgagctgtgccgccgctttaatcgcgaagaagcctttaccgaagggctggacgagatgggctggctgaaacgcatctggcaggaaggtgtacaacaaggcaaaggacgcggcgttcatctgccagcgtttaatgacttctggaataacaaagagtacgtcgagtttgaccatccgcagatgtttgttcgccaccaggcattccgcgaagatccggatctcgaaccgctgggcacgccgagtggcctgattgagatctactcaaaaaccatcgccgacatgaactacgacgattgtcaggggcatccgatgtggtttgagaaaatcgaacgctcccacggtgggcctggctcgcagaagtatccgttgcatctgcaatctgtgcatccggatttccgacttcactcgcagttatgtgagtcggaaactctgcgtcagcaatataccgtagcgggtaaagagccagtatttattagcccgaaggatgccagcgcgcgcggtattcgtcacggtgatgtggtacgcgtctttaacgttcgtggtcaggtgttggctggagcagtggtttctgaccgttatgcacccggcgtggcgcgaattcacgaaggggcatggtacgatccggacaaaggcggcgagccaggggcgctgtgcaaatacggtaaccccaacgtgttgaccatcgacatcggtacttcgcagctggcgcaggcgaccagtgcgcacactacgctggtggaaattgagaagtacaacggaacagtggagcaggtgacggcgtttaacggccccgtggagatggtggcgcagtgcgaatatgttcccgcgtcgcaggtgaaatcatgaccacgctgacagcacaacagattgcctgtgtttacgcctggctggcgcagttgttctcccgtgaactggacgatgaacaactgacgcaaatcgccagtgcgcagatggctgaatggttttcgttgctgaaaagcgaacctccgctcactgcggcggtgaatgggctggaaaacagtattgccactctgacagtacgtgacgatgcccgtctggaactggccgctgacttttgcggcctgtttctgatgaccgacaaacaagcggcgctgccgtatgcatcggcctacaaacaggacgagcaagagattaaacgcttgttagttgaggcagggatggagaccagcggcaatttcaacgaaccggcagatcatctggcgatctatctcgagttgttgagtcatctgcatttttcgctgggagaggggaccgttcctgcgcgaagaatcgacggtttgcggcaaaaaacactgacggctctgcgggaatggttaccagagtttgctgcgcgttgtcgacagtatgaccgctttggtttttacgcggcactaagccagttattgctggtgttagtggagtgtgactaccaaaaaagataatgccgtttgtaggcctgataagacgcggcaggcgtcgcatcaggcattagtgcgcagttgccggatgcggcgagaacgccttatccggcctacgggaacagtgctttttgtgggcctgataagatgcgttaagcgtcgcatcaggcattatggcgcagttgccggatgcggcgagaacgccttatccggcctacgggaacagtgctttttgtgggcctgataagatgcgttaagcgtcgcatcaggcattatggcgcagttgccggatgcggcataaacgccttatccggcctacgggaacagtgctctttgtaggcctgataagacgcgttaagcgtcgcatcaggcaacaaactcacgggtgagccacaaaccgggaaagccgctggcgcagcaggcggttttcctgcttcaggtgcgcaatatcatccattaacgtcagcgccaccgcgatccccggccagtccagagccagttcatgacgcaggcgtaccgcgcgttgcaccacaatggcggcatggtcgtcaaatacccaggttgtctcctggatctcactcggttcaaccacccccaaaccgacaatttcattcaactcctcttcagagatgccggtatgcaggcaaaattcggtaatagtaaaagtcaccgtaacattagccattatgctttcccccaatctttacgtggatcaaaagacgactgggcgtctgccagttgctgccacagcgcggcagtgttttcatccggtttcggcggcatcacgattttcagtaccgcatacagatcgccggtctgttttttgctcaccagacctttgcctttaacgcgcaatcgttgcccggcctggctgccaggcgggatagtcagcaaaatgctttctttcagtgttggaacggtgactttagtacccagcgccgcttcccacgggctaaccggcaccactatttccagatcctggccgacaatatcaaacagcggatgtggcgcaatgtgaatcaccagccacaggtcgccatttggaccgccgttttcgcccggcgtcccctggcctttcaggcggatgcgttgaccattgccgacgcccgccgggatcttcacattcagcgttttcgggatttcctgttcgatcatgccaaaggcgttataaaccggcaggttatagctgatggtacgcttatgctcagtaagcgtttcttcgaggaaaaccgccacttcgatttcaatatcgtggccgcgtgtggcggggcgttgacggctctggcgggcatgctgaccgaaaattgacgagaagatatcgtcaaaatcttcggcgttaaaactctgaccgtcgccatgatggaactgacggttaaattgcggatcgttgcgatgttgccacatctgatcatactcagcgcgacgttgttcatcacttaacacttcccaggcttcagcgacctctttgaagcgggcttcggcatccggttctttgctgacatcaggatggtatttgcgggccagtcgacgataggcggtcttgattgtcttgagatcgtccgtcggtttcacgcccatgatggcgtaataatcctttaattccatagcgttatctcgcgtaaatcaacacaaattgaaggaacccctgtaaggtaactcctataagtgtagggtaatcctcaaaatttcatatgccaacacagaatatgttattgaaatcatcgcggaggggaggtcgcctcaaggtgggaggaacatattttatttacctcactcctgaacttttggctcatgcttacaagttaaacaataaggaaaggaatgcacaactcgactatttaaatcgttatgcaatttaatgataaagacatgtgctaaaaaccattgctattagtctcacattctttttttattggtaatggtaacgccgctgattttctttatagctactgatgtaatcattagcggcgtaaacgaggccggggctaatcaggcatagtttgcgtcaaaacttgcctgtttttaaaggggaatatagaaaaacaggcgttcaacgagccattttgcgaacctgttcccggaaaaatgacatatttctgtcacactctttaattattgataacaaaagaggtgtgaggaatgaacaaaacgctaatcgccgcaactgtggcagggatagttttactcgcttcaaatgctcaggcacaaaccgtaccggaaggctatcagctacagcaagtccttatgatgagccgtcataacttacgtgcgccgctggcgaacaatggcagtgtgctggagcagtcgacgccgaataaatggcctgaatgggacgtccccggtgggcagctcaccactaaagggggcgtgctcgaagtgtatatgggccattatatgcgtgaatggctggcagaacaggggatggtgaaatcaggggaatgcccgccaccggacaccgtttatgcctatgccaatagtctgcaacgcaccgtcgcgaccgcgcagttctttattactggcgcattccctgggtgtgatattcatgttcatcaccaggaaaaaatgggcactatggaccccacctttaacccagtgatcaccgatgattccgccgcattcagtgaacaggcggtggcggcaatggagaaagagctcagcaaactccagcttaccgacagctacaagctactggaacaaatcgttaactataaagattcccctgcctgtaaagagaagcaacaatgttcgcttgtagatggcaaaaatacctttagcgcgaagtatcaacaagaaccgggcgtttccgggccgctgaaagttggcaactcgctggtagatgcgtttactttgcaatactacgaaggttttccgatggatcaggttgcctggggagaaattaaatctgaccagcagtggaaggtgttgtcgaagctgaaaaacggttaccaggacagcctgtttacctcaccggaagtggcgcgcaatgttgcgaaaccgctggtcagttatatcgacaaagccctggtcaccgatcgcaccagtgcaccgaaaatcacggtattagttgggcacgactccaacattgcctctctgttaacggcgctggatttcaaaccgtatcagttgcatgaccagaacgaacgcacgccgattggcggcaaaatcgttttccagcgttggcatgacaagcaaagccaatcgcgacctgatgaaaattgaatatgtgtaccagagtgcggaacagttacgtaatgccgatgcgttaaccctgcaggcacctgcgcagcgcgtgacgctggaattaagcggttgcccgatagatgccaacggtttttgcccaatggataagtttgatcgcgtattgaatgaagcggtgaaataacagaaaactcccccgcgtgaagcgggggagtcgctggttaaacgtttttacgttcgatggtctgttcgccccaaaaaagcgaatctttatcggtcttagcaaaggctttgactaacacttcatcgctaccttcttcccaaatcttttccgccattttttcgtcgtacccggcgacttcgaaaatggcctcggctatttccggcgacgtattgcgcagagatgcccattcaccgacgtgatgagctttcgcttcttgagttggcatgcgtatcctcctgttgaagattagccgttaagtttaactgccagacctgcgacatattccccttgataacgagcaatagacagttcttcctggctgggctggcgtgaaccgtcaccgcctgcgatggtggttgcgccgtacggcgtaccgccgcgaacctgtgaaacgtcaaataattcctgcgctgcgtagccaatggggacaatcaccatgccgtgatgcgcaagggtcgtccaggtggatgtgatggtttgttcctgaccgccgccagtaccggtggaactaaagacgctcgccagttttccgtatagtgcgccggaagcccacaggccgcccgtctggtcgaggaaggtacgcatttgaccggacatgttaccaaagcgggtaggtgtaccaaaaataatggcgtcgtaatcggccagttcttgcggggttgcaaccggtgcagtttgcgttttaccgcctgctttttcaaataattgcggcggcatggtttccggtacacgcttaacgacaacttctgcgccatccactttgcttgcaccctcagcaactgcgcgtgccatcgtttcaatatgtccgtacatggaataataaagcaccagaactttagccatttctaaccactcctcgtgttatctctattccgtagcgattcgctaccacttatttaaagataagacgtccttttcagagtgcaaatttcacaaccacttatttgatttataacaactttcacaagcacgtaattttgtcgcaaaatgacacatttttatctcatcgcgtttttttaatcataagagcggcttatggataattattggagatgatatctattctcgctaagaagctgttgcaggatattaccaaacgcgggtctgcccgcgtcagttcactaagcttagtcccacgtagcgaaaatatggcagccgccatacgccgcgttaattctatgcaatatgatgtctatacccagacggaggtcagtaatggcaaaccatcgaggcggttccggcaattttgcagaagaccgcgaaagagcatcagaagcaggtaaaaaaggtggacagcacagcgggggtaatttcaaaaatgacccgcagcgcgcatctgaagcaggtaaaaaaggtggcaagagcagtcacggtaaaagcgacaactagccgggctaatcaatgacgcatgcatttttgtctgtagctcgtcaaaacgccatcaccgccggttaccccggcggttttctgtttatggctcctgatgaacaacttctggcggtggaacgtcaaccaaccttctgcttaacaacgcattgagtaaaatcgcgccaaaggtggctgtaccgatccctcccaacgtaaaaccgcccagtgtgagagcaaaatcacccgcacccagcactaaggttactgcgaccataatcaaattaccgttctggcttaaatccacacggttttgtacccagatccgtgcgcctgcgacggcaatcagcccgaacacaacaattgatgcaccaccaatcaccgcggccggaatagtatggatcagcgcgccaaatttcggcgaaaagcccaacagcatggcgatgacggcagcggcaacaaacaccagcgtcgagtagacttttgtcacggccatcacaccaatattctcggcgtaggtggttacgccgctaccgccgacagagccagaaagcatcgtcgccagcccatcgcctacgaatgcccgccccatatacgggtccatattgcgtccggtcatcccggcgaccgccttgagatgacctaagttttccgccaccagaatcaccgccacgggcgcaatcagcatcattgcctgaccattaaaagcaggagtggaaaaatgtggcagaccgaaccaggcagcatggctgacgagagtaaaatcgacggcttttcccagccctaaaacgttggtcatcacgccatacagcagacaggcgacaattaatcctacgagaatcaataatcgctggatcatgccacgggtaaatacggccaccagcccaatacacagcaccgtcattaccgccatccagctatcaaaggccgaagccgatacatttttcactgcgataggcgctaagttcaggccaatcgccatcactaccgcacccgtcacaaccggcggcattagtcgttcaatccagcgcgtaccgattttcatcaccaccaggccaatgacggtataaaccagcccacaggcgataatcccgcccagcgcgatgctgatattcggattaattccctgaccattaaagcccgttgcggcaatcaccacgccgacaaaagccgcgctggaaccgagataactgggcacgcgcccgccggtaataaagaaaaacagtaacgtgccgatccccgacataaaaatggaaagattgggatccagccccatcagaatcggcattaacaccgtcgcgccaaacatcgccaccgcgtgttgaacgcccattactgccgtctgagcaaacggcaatcgttcatccggcgcgaccacgccgctctctgtagaggtcgattttaactgccagtgaggaaaaccgaacattgccatcagctgtctccttaaggaggttaacaagcagggcgcatcagcgcgtgataactgcgatcgaaccacaccagcccgtagggtgtggcgtgacgatgaatcgcttcgatggcgcaaaacaaaatgtcgtgggtgccgacgctcaccacctggctgatacggcagtcaaacgaaaccagtgcctcttccagttgcgggcatccggtcacaccagtctgccagcgggcggcggcaaagcggtgttccatgggcgttttgccgccaaaaaggtttgaaagcgactcctgcccggcgctaagtgtatttacacacagcgttcgattttcattgaataccggccagacggacgccccacgattcaggcacaccagtaatgtgggcggcgtgtcggtcacgctgcagacggcgctggcggtgaacccggcgcgcccggctggaccgtccgtagtgatgatattgaccgccgcgcccatacaggacatcgcatcgcgaaaggtttgttgatcgacaatgttcattgtttgctccttacaacagcccgcaggcttcttcaaaggacagacgtggcaggcgcgcaaaaagtttgctggaatcgccatagccgatattaatcagcagattgctcttcagcgtgctgcccgcaaaaaaggcgtcgtcaacgtattgacggtcaaagcccgacatcgggccggtatccagccccagcgcacggcaggcgacgatcagataggccgcctgcatggaactgttgcgaaacgctgtttcttcggcaagttgtggactggaggtaaaccaactgcgggcatcgccgtgaggaaacagctgtggtaaccgttcataaaattcactgtcccaggcgacgatagcggtgacgggcgcggtcagggttttttgcagattgccgctggaaagcgccgggcgcagacgttcttttccttctgcagtgcggataaacacgatccgtgtcggagaacagttagcagatgtcggcccccatttcatcagggcataaatctcccgtaacgtctcatcgctgacgggtgtctcccgccagccgttgtgagtgcgggcatcggtgaacagggtgctaagcgcacctgggctaacggcttcgttcatagcaattccttacagggcggcttcacggtgatgtaacaggctggcaagcccgttgagtaacagagcattaaacgtttcgggatcggtcacgttgcaggcgtgtccgccatagcgcatcaccattttctggctatcgggcagagcggcatgaagttcactggaacatgctgatggcaccagcagatcatcactggcgcagatgatttgcaccgggcagcggatacgatccgcatggcgactaaagtcagcgcgtttgagggcgttaagtcgacgcagtaaattatttttgccctgaaaatgcgccagtgccagcgcgccttctgcctcaaggcgaggtgcgcgggccgccatccagtcggcgggatagaggaacaacggctgcgcttccacccatgcctgcgcgccgccgctatgtagtaactgttcgcgaacctgaaaacagcggcgcgtatgggcgtttattcgtagccagccgttaacgctgaccagcacagttaccgacgcgggataatccagcgccagctgcattcccaccagcgcaccgagcgcatggccgaccaccgcgtaacgctcaatccctgcggctaccagcgcctgatgcagttccgctgccatctgggcgatactgtaatcttctgccagcgtgtcgggattattgccggtgccgcgctggtcgtaacagactacctgatactcctgatccagcaccgccagttgcggtaaccagtaactgccgctaccgccaagacccgaaatcaacaccactacgggcgcatcagcataagggggaggtgagagtgaaagtttcatcgcggtctcacttggcgatatgcgcaattgtggcgatttccaccagcgcgtcaggttttaccagtccgcactgaatgcagaatcgcgccggtttgtcacccgggaaaaactcggcgtagatttcgttaatcgcggcgtaatttttccagtcggtaataaagatgctgttgaaggtcacatccgccatcgtgccacccgccgtctcgatgaccttgcggatggtttccagaacgtggcgggtttgcgcctttgggtcatcggcaaacagcacgttgttatgttgatcaaaagccagcgtaccggagacatacaccacgccatcagccagcgtgccgggaacgaagggggccagcggtgcgctgctgccagcaggaataattacggattttggcatcgttaaactccttaagcgatacgagcaaaggacgtggaagaaagcgcgtcgcagaacgtttcgacgtcgctgacccagccaaaaaaggtttcgatattgaacaacgcggctttctgtgcaaattccggccccgcctggtgtgttgcgtcttccagcaccacgccgaaatactccagaaaaaagccgtcgcgtagcgtcgattcgacgcagacgttggtagcgataccggtgaaaaccagatggcgtattccacggctgcgcaaaatgctgtccagcggcgtattgaagaaaccgctgtagcgcggcttcggcagcacaatatcgccaggctgcggcaccagttcatccaccagttgataatcccaggagcctttcgccagcaatttcccctgcagctgcggctgattacgcatggttttcagggcgttcgatttatgaaaattcggtgagccggggccgccagcctcgacatactgttcatcccagccattttgaaaccagatgatcagcatccctgccgttcgcgctgcggtcacggcggtttgaatgttggcaatgaccgggcgagtggttgagacatcaaacccggcgagatctaagtagccgcctggcgtggcataggcattttgcatatccaccacgatcagcgcagtttgctgcggatcgaaggtaatggcttccggtcgtgcggttaaggttgtcatcatgccacctcctgagtcagcgcagggagatgggcgcggcacagcatcagtggttgaatgcgctcgccgaaggtttcgattcccgacagaaaatcatcgaaggtcaacagcacgccttcggcaccaggcacgtttgcgacttcatctaacatgcgcgcgacactggcgtaagaaccgactaacgtccccatattgatgtttaccgccgaagtgggatcggccatctgacggacgttggtgtcagtacctgagcgggtatctttctgactttgttcagttagccagcttaacgcctcttcatccgcgcccgctttgtagtgttcccattttgcacgagcggcatcgtcggtttcgtcggcaatcaccataaacaacacataagagccaacgtcgcgtccggtttgctctgcggcctgtttcatccgcgcagcggtcggggcgaaagccgtgggtgtatttacgcctttgccgaaacagaagttaaaatcggcataccgggcggagaacgccatgccagcgtcgctttgcccggcgcagatcactttcatggggacactcggttgcggactgacgcgacaatcatccatagtgaaaaaatcgcctttaaaatcgcttttccccgagccccacaggtcgcgcagcacctgaacatattcggtgagatagtcgtaacgacgggagaaatagtcatcgccaggccagatccccatctgctcatactcgggcttctgccagccagtcacgaggttgacgccaaaacgcccgccagagatggagtcgatggttgcggccatacgggcgacgattgccggaggtaacgttaaggtggcagctgtcgcgtatatctgaatgcgtgaggtgacggctgccagccccgccatcaaggtgaacgactcaaggttgtgatcccagaactcagttttgccgccaaagccacgcagtttgatcatcgacagggcgaaatcgaaatggtagtgctccgctttttgcacaatggctttattcagttcaaatgtcggcatgtactgcggcgcgtgggtcgaaatgagccagccgttgttgccaataggtacgaatacgccaattttcatcatcaacctctcttcgtctcgtaaagtgaaagtcagacggggcgctgcatcctgcatatccttttcagccgcgtaatggcttgtttgcaaagcggatgccagtttttaaaaagtgaatgttattaatgtgttaatgttaagttgtctaaaatgcctgaaaaaaagtggactaaacggtcaaaacagttgcacataaaacatgcattcgtgcgcgatgagagtgcagaaggtcgaggccgggcgggggttttgctatcctgttgccaatcaacaagaggggagagcgcatgacgcaaggcgcagtgaaaacaacgggtaagcgttcgcgcgcagtaagcgcgaagaaaaaagcgattcttagcgcagcactggacactttttcacaattcggttttcacggcacaaggctggagcagatcgcggagttggcgggtgtttcaaaaaccaatctgctgtattactttccgtcaaaagaggcgctgtatatagccgtactgcggcagattctcgatatctggctggcaccgttaaaagcgtttcgagaagatttcgccccgctggcggcgatcaaagaatacatccgtctgaagctggaagtttcccgcgattatccgcaggcttcgcgcctgttctgtatggagatgctggcaggtgcaccgctgttaatggatgaactgacgggcgatttgaaggcattaattgatgagaaatcggcgctcattgccggttgggttaaaagcggcaaactcgcgccgattgacccgcagcatttgatttttatgatttgggcttccactcaacattacgccgattttgcccctcaggtggaggcggtgacaggcgcgacgttgcgcgatgaggtgtttttcaatcaaacggttgaaaacgtgcagcggattattattgaggggattcgaccacgttaaagatgccggaggaggttgtaacatcctccggctacctgtttaaccgatcgtcattaaactggcgttaccgccagcagcagcggtattcacactcagcgaacgctcgatatacagccgttccagaaggatattgctttcgccacgggcaaaaccctgcaccgaaacaattgcaccatcccgcgcggcaacggcttcacacaatgcgcgaagctgatccgaatcaccgtggaagatcaccgcatcaaatggttgagcggttatattttccgctttcgccagttgaatacgttcgctgactgccgatggcaatgccttcactaactgacgatgtagcgcatcatccggccacagcatctggctacccactgccagcacggcggcgagctgagtcagcgcatcctgttcatcatccgcaatacacaacacgcgctcacgcggcagcagcgtccaggtgttgcgttcacccgtcggccctggcaacaatcgttgtgttcctgcctgcgccaactcgccatattgcgtacataacgcctgcaattctggacggtttgccgcccattcccgcagtgcatttagcggctgagtcaatgcggctttcaactgcgcatcgaccggatactccgcatcctgacgcgcgagcgtcactgccagtgcactttccgggcgattcgccagcagacggtagagatagagcggaccgcctgctttcggcccggtgccagacaacccttcgccgccgaacggttgcaccccaaccaccgcgcccaccatattacggttaacgtacagattaccgacctgggccgagccagtgacctgggcaatggtttcatcaatacgcgtatgaacgccaagcgtcagaccatagccggaagcgttaatctgctcgatcagctctgggagctggttacggttgtaacgcaccacatgcagcaccggaccaaagacctctttttgtaattcggcaaagtcatccagttcgatcagcgtcggagcgacaaaggtgccgctttgccattcacgggcatcttcgctgttttcccgcaccgcctggaacacctgacggcctttactacgcatggtctgaatatgacgctcgatattggctttcgcttcgctatcaatcaccggaccgatatcggtggtcaggcgacccggattacccatccggcattcggccattgcgccgcgcagcattttcagcgtgtggtcggcaatctcatcttgcaggcacagcacgcgcagtgccgaacaacgctgacctgcactgtcaaacgccgaggccagcacatctattacgacttgttcggtcagtgctgaagaatcgacaatcatcgcgttcatgccgccggtttcagcgatgagcggaatagggcgaccctgagcgtccaggcggctggcgatattgcgctgcagtaacgtagcgacttcggttgaaccggtaaacatcaccccgcgcacgcgatcatcacccgtcagttgcgcgcccacggtttcaccccgacctggcagcaattgcaccacgcctggcggtacacccgcttccagcaaaatggcgatcccttgcgcggcaatcagcggcgtttgttctgccggttttgccagcacgctgttacctgccgccagtgcggcagcgatctgtccggtgaaaatagccagcgggaagttccacggactgatacataccacaggccctaatggacggtgggtttcgttagcgaaatcatcccgcacctgtccggcatagtagtggagaaaatcgaccgcttcgcgcacttcggcaatggcgttactgaaggtttttccggcttcacgcaccagaataccaatcagttgctgcatctggctttccattagcacggcagcgcgatgcaaaatcgccgcgcgttcagccggaggagtggcaaaccagattggcgcgttattaaccgcactttccagcgcctgttctacttcacgcggcgtggcttcacgcacatagcccacaatatctttcggttccgcagggttaataacgggcgacatctcaccagccgcgaccggttgttccagcattggcaaggactgccatttttgcagtgcactattgagcagggctgaagagagcgaggccagacggtgttcgttagcgagatccagccctgccgagttgtcgcgcccgtgaccgtaaagatcgcgcggcaggggaattttcggatgcggtaatccagtttgcccttcctgttgcgccagtttttctacagcagtgactggatcggcgaccagttcatccagtggcaaagaggtgtcggcaatacggttaacaaacgaggtgttagcaccgttttccagcaggcggcgcaccagatatgccagcagcgtttcatgtgtaccgaccggagcataaatacgacacggacggttaagtttgccgtcggcaactttcccggtgacctgctcatacagtggctcgcccataccatgcaggcactggaactcgtactgacccgggtagtagttttgacccgccagttgataaattgccgccagcgtatgggcgttgtgcgtcgcgaactgcgggtagattagatttggcaccgccagcagttttttcgcacaggcaagataagaaacgtcggtatacaccttgcgggtataaaccggataaccttcaaggccgtccatctgtgcacgcttgatttcactatcccagtacgcgcctttcaccaggcgaatcatcagacggcgacggctgcgggtggcgagatcaatcaggtaatcgatcaccaacgggcagcgtttttgataagcctgaataacaaaaccgatgccgttccagcctgccagttcaggctcgaaacagagtttttccagcagatcgagggagatctccagacgatcggcctcttcggcatcgatgttaataccaatatcgtactgacgcgccagcagggtgagtgatttcagacgcgggtaaagctcttccattacccggtcatactgggcgcggctataacgcggatgtagcgccgacagcttgattgaaatgcccggaccttcatagatgccacgaccgttagacgctttaccaatggcgtgaatcgcctgctgataggaaaccatatacgcttgtgcatctgcggcagtcagtgcggcttcgcccagcatatcgtaagagtaacggaaacctttctcttccagtttgcgggcattggctaacgcttccgcgatggtttcgcccgtgacgaactgctcgcccatcaggcgcatcgccatatccacacctttgcggatcagcggttcaccgctcttaccgataatgcggttcagcgagcgggagaggctggcttcgttatgggtggaaaccagtttgccggtaaacagcagcccccaggtagcggcattaacaaacagggacgggctacgaccaatgtgtgactgccagttaccgttactgattttgtcgcgaattaacgcgtcacgggtggctttgtcgggaatacgcaacaacgcttccgccagacacatcagcgccacgccttcctgcgatgacaacgaaaactcctgcaataacccctgaaccatacctgcgcgaccactggcgtttttttgattacgcagtttatcggccagttgatacgccagtttgtgcgcctgttcagctactggctgcggcaggcgagcttgttccagcagcatagaaaccgcttcggtttccgggcggcgataggcggcggtgatggcggcgcgggaaaccgactggggcaatatttgctcggcaaagtcgaggaaaggctggtgtggttcctctgccggagtcggtgcttcatcgctctcattggccgcgccagaaagcagcgctggtagctccgggagagtatcgctgttttccagttgttcaagataagaaaaaatcgcctgtttaattaaccagtgtggtgtgcgatcgatacgtgtcgcggcagacttaatacgctcacgcgtcgcgtcgtccagcttaacccccatggtggtggttcccatgccattactcctgttgttctgaaaggtgcaacttaacgttatcgtgaaatatctatgatgttgcaactttgtgcaaccgtgttaaatgtgacctgcgtagcaagcttaaaaatgaatgaaatgttaataaacgaaatcgatatgacagggattaaaaaaataactcagactttttctctgcggcagttaacatttttgaaaggtgcaaccgcaaaaaatgtgagagagtgcaacctgatgaaaaatagtgtcgctgagcactaaaatttaatgtaaatggtgtgttaaatcgattgtgaataaccagcgcttccggcaggatacggtcgccctggtaaaacataaactctgttaccccgttccggtggcagatataacggcaagtttcgacattgccgataataattttttggagactttagatggctattagcacaccgatgttggtgacattttgtgtctatatctttggcatgatattgattgggtttatcgcctggcgatcaacgaaaaacttcgacgactatattctgggcggtcgtagtcttgggccattcgtgacggcattatcggcgggtgcgtcggatatgagcggctggctgttaatggggttgccaggcgctgtttttctttccgggatttccgaaagctggatcgccattggtctgacattaggcgcgtggatcaactggaagctggtggccgggcggttgcgtgtgcataccgaatacaacaataacgccttaacattgccggattatttcaccgggcgctttgaagataaaagccgcattttgcgcattatctccgcgctggttattttgctgttcttcaccatttattgcgcttcaggcattgtggcaggcgcgcgtctgtttgaaagtacctttggcatgagctacgaaacggctctgtgggcgggggctgcggcgacgatcctttacacctttattggcggtttcctcgcggtgagctggactgacactgtacaggccagtctgatgatttttgccctgatcctgacgccagttatcgtcattatcagtgtcggtggctttggtgactcgctggaagtaatcaaacaaaagagcattgaaaacgtggatatgctcaaagggttgaattttgtcgccattatctcgctgatgggttgggggctgggttacttcgggcagccgcacatcctggcgcgttttatggcggcagattctcaccacagcattgtccatgcgcgtcgtattagtatgacctggatgatcctctgcctggcaggggcggtggctgtcggcttctttggtatcgcttactttaacgagcacccggcggtagcaggtgcggtaaaccagaacgccgagcgcgtgtttattgaactggcacaaattctgtttaacccgtggattgccgggattttgctgtcggcgattctggcggcggtaatgtcaacgttaagttgccagctgctggtatgttccagtgcgattaccgaagatttatacaaagcgtttctgcgtaaacaggccagccagaaagagctggtgtgggtagggcgagtgatggtgctggtggtggcgctggtggcgattgcgctggcggcaaacccggaaaaccgcgtgctgggcttagtgagctacgcgtgggcaggctttggcgcagcgtttggtccggtggtgctgttctcggtgatgtggtcacgcatgacgcgcaacggtgcgctggcggggatgatcatcggtgcgctgacggttatcgtctggaaacagttcggctggctgggtctgtacgaaattattccgggctttatcttcggcagtatcgggattgtagtgtttagtttgctgggtaaagcgccatcagcggcgatgcaaaaacgctttgccgaggccgatgcgcactatcattcggctccgccgtcacggttgcaggaagggtaagggaaggcgttttaccgaaaatttcacgtcataaccggaagcaggcagagggcaatcagtgattgccctctgcgttttttctcaaaatatttttacatcttctcatcattatcactacattccacttgtatttttcttcatcgtaatgataatcgctatcactgcgatttacttttctttgcatagattgactcagaaaaacgtttaagggtggggggcatgtttgttccgtttctcattatattgcgcgaaggacttgaagccgcgctgattgtcagtttgattgccagctatcttaacgcgtacccagcgaggccgatggattggtgtaatgtggattggcgtgttgcttgccgctgcgttgtgtctgggcttgggtatcttcattaacgaaaccaccggcgaatttccgcaaaaagaacaggaactgtttgaaggcattgtggcggtgatcgccgtggtgatccttacctggatggttttctggatgcgcaaagtgtcgcgcaacgtcaaagtacaactggagcaggcggtcgatagcgcattgcagcgtggaaatcatcatggctgggcgctggtgatgatggtcttttttgccgttgcaagggaagggctggagtcggtctttttcctgctggcggcatttcaacaagatgtcgggatctggccgccgctgggtgcaatgcttggtcttgctacagccgtggtgcttggcttcctgctctactggggcggtattcgcctcaatcttggtgcattttttaaatggaccagtctgtttattctcttcgtcgccgcagggctggcagctggtgccattcgcgcatttcatgaagccggattgtggaaccactttcaggaaatcgccttcgatatgagcgcggtgctctcaactcactcgctgtttggcacactgatggaagggatttttggctatcaggaagcaccgagcgtcagcgaagtcgccgtctggtttatttatctcatcccggcgctggtggcatttgttctgccaccacgcgcaggggcgactgcgtcccgctccatgtagcaaatacgacgcaaactcttgcttagttacaacatactttaaagggatagtctcgtcatgaccattaacttccgccgtaacgcattgcagttgagcgtggctgcgctgttctcttctgcttttatggctaacgccgctgatattccgcaagtcaaagtgaccgtgacggataagcagtgcgagccgatgatcattacggttaacgccgggaaaacacagttcattattcagaaccacagccagaaggcgctggagtgggagatcctcaaaggcgtgatggtggtggaagagcgggaaaatatcgcccctggttttagccagaaaatgacggcgaatttacagcctggcgaatacgatatgacctgcggtctgctgactaacccgaaagggaagttgatcgtcaaaggtgaagcaacggcggatgcggcgcaaagtgatgcgctgttaagtcttggtggtgcaattactgcatataaagcgtatgtcatggcggaaaccacgcaactggtgaccgacaccaaagcctttaccgacgctattaaagcaggcgatatcgaaaaagcgaaagcactgtatgcgccgacgcgccagcactatgagcgcattgaaccgattgctgaactgttctccgatctggatggcagcattgacgcccgtgaagatgattacgagcaaaaagccgccgatccaaaattcaccggtttccaccgtctggaaaaagcattgtttggcgataacaccaccaaagggatggataagtatgctgaccagctttataccgatgtggtcgatttgcaaaaacgcatcagtgaactggctttccctccttcaaaagtggtcggcggtgcagccggactgattgaggaagtggcggccagcaaaatcagcggtgaagaagatcgctacagccacaccgatctgtgggatttccaggctaacgttgaaggctcgcagaaaattgtcgatctgctgcgtccacaactacaaaaagcgaatccggaactgctggcaaaagtcgatgccaacttcaaaaaggtcgataccattctggcgaaataccgtactaaagacggttttgaaaattacgacaaactgaccgatgctgaccggaatgcactgaaaggaccgattactgcgctggcggaagatctggcgcaacttcgcggtgtgctggggctggactaagcgttatgcagtatgaagatgaaaacggcgtgaatgaaccgtcacgccgacgtttactgaaagggattggtgcgctggcgctggcgggaagttgtccggtcgctcatgcacaaaaaacgcaaagtgcgccgggtacgctttcaccggatgcacgcaatgagaaacagccgttttatggtgagcatcaggcagggatcctgacaccacaacaggctgcaatgatgctggtggcgtttgatgtgcttgccagcgataaagccgatcttgaacggttgtttcgcttgttgactcagcgttttgcttttctgactcagggcggagcggcaccagaaacgccaaatccgcgcctgccaccactcgattccggcattcttggcggctacattgcgcccgataatctcaccatcacgttatcggtgggtcactcattgtttgatgagcgctttggccttgcgccacagatgccaaaaaagttgcagaagatgacgcgtttccctaacgactcgctggatgcggcgttatgtcatggtgatgtgttgctacaaatttgcgccaacacccaggacacggtgatccatgcgctgcgcgatatcatcaaacacacgccggatttgctcagcgtgcgctggaagcgggaagggtttatttccgaccacgcagcgcgtagtaaaggcaaagagacgccgataaatttgctgggctttaaagacggcaccgccaatcccgatagccagaatgataagttgatgcaaaaagtggtgtgggtgacggcagatcagcaggagcctgcgtggacaatcggtggcagctatcaggcagtacgcttgattcagtttcgagtggaattttgggacagaacgccgctgaaagagcagcagacgatatttggtcgtgataagcaaaccggtgcgccgctgggcatgctgcatgagcatgatgttcccgattacgctagcgatccggaagggaaggtgattgcgctggacagccatatccggctggcgaatccccgcacggcggagagcgagtccagcctgatgctgcgtcgtggctacagttattcgttgggcgtcaccaattccgggcaactcgatatggggctactgtttgtctgctaccaacacgatctggaaaagggcttcctgacagtacaaaaaaggttgaatggcgaggcgctggaggaatatgtcaaacctatcggtggcggctatttctttgcgctgccgggtgtgaaggacgcgaacgattatctcggaagcgcattattgcgggtttaatgtttttaggcggataaggcgtttacgccgcaccaggcgttcgtacactgatgcgacgcttgcgcgtcttatcatgcctacaatcggtgcgggtcggtaggccggataaggcgttcacgccgcatccggcaagcttttaccagtactgcgaatcctgctgaaagcacacagcttttttcatcactgtcatcactctgtcatctttccagtagaaactaatgtcactgaaatggtgttttatagttaaatataagtgaatatattgttgcaatgaatgcgagatctgttgtaattattaagtagcagcggaagttcccggcagtgatagtcagtcactatggagatcgcggatggtaacgtcctgttctggacaatgttttgttaagcaacgctccaccacttgcggagatttctcctccggtagcaacttcgtcactctgtatttttctcacttcctctctttactcgtgttaccgacgccgcaaacggtgtgcgtagccgtttttcggcattttatccaaaagcaaactatggcttacaaggaagccaaccctctgatgttcgtgcgcataatcgcgctgccaacggcgcgtgtgatgaatacaaacaactcaaggtgctctccatgggaagacaaaaagcagtgatcaaagctcgtcgcgaggcaaaacgtgtgctgagacgggattcgcgcagccataagcagcgtgaagaagaatcggtcacctcgcttgtgcagatgagcggcgtagaagccattggtatggcccgcgacagtcgcgatacctcgcccatcctcgcgcgaaatgaagcgcaattgcactatctgaaggctattgagagtaagcagctgatattcgccacgggcgaagccgggtgcggaaaaacctggatcagcgcagcaaaagcggcagaggccctgatacataaggatgtcgacaggattatcgtcacccgtccagttctgcaagccgatgaagatcttggcttcttacctggagatatcgcagaaaagtttgctccctattttcgtccggtctacgacgtgctggtccggcgcttaggggcttcctttatgcagtactgcctgcgaccggaaatagggaaggtggaaattgcgccgttcgcctatatgcgtggacgtacctttgaaaatgcagtcgtcattcttgacgaggcgcagaatgtgactgccgcgcaaatgaaaatgtttttaacccgcctcggggagaacgtgacggttatcgtcaacggtgatatcacgcaatgcgatttgcctcgcggcgtgcgctccggattaagtgacgcgctggaacgtttcgaagaagatgaaatggtcgggatcgtccgattcggtaaagaggattgcgtacgttcggcactttgccaacgtacgctacatgcatacagttaagtgtattatcggcgcagagcccgggcgaaccgggctttgttttgggtgtttacgcccggactagcgctttttctgaaaccaccatttttatttgcccctggctggtgaagtgtacgctcatcctgtggcttttttgtagttgctgatagagctcatcaggtattgctaagctctcagcatattcttgcggcgtatattggtaggctgcatgatgctgctgtttttgaaaacgtagcttattgtacagcgcccagacaattaacacgacggcattcgccactgccagcaaaaaatagaactgaagtcggcttctggcctcgctttgccagtaataacccgtcagcagatccattgcgaataagaatatgaacaaagcaaataatgtccataagatggttgtggcaacataatcaaccattaaacgtactggcgattgtcgggtcgtaataattaaattgttcatattaacctctcagaatcccgcgatcgggacttacccaacgggcgcgttgctttttaggcatcaacatgactcgtgtaaatgataccaatgtcgttgccagactcagcatccagaaaataaccgggaaccaaataatccagaaaagcgatgaagtcagattatgctcatagcgattctcgatcatcaggctgacaataaattgcagtaaacataacgtacacaataatattccggcagtatgtgtcgcagcgatatgtgtcaattcaatatttaacggtacaccggcaagttggactgcgtaaataatgaaaccgaccaggcaagtgaaggcccatattgtcgtcaggcagtattcaaaaaacagcggccacattcgaaagttttctttgcgccacaaccttgtcatatttttgaggaatacttctgcaccgccctgagcccagcgcaggcgctgtttccacagcccttttaacgtttcaggcattaatatccagcacagcgcccgtggctcgtaaaaaatcgcccactgattcaactgcagcttccagctaatatcaatatcttcggtgatcatatcgtcactccagtaacccacttctgccagggcgctgcgacgaaatgcggcaataacaccggaaacggtaaatacgtttccatagatacgctgggttcgcttgatcaaaccaataattgaggaatactcgccaacctgaattttacccaccagggtagaacgtgttcgaatacgaggattaccggttacggcacccacacgcgggttgtacaacatcggttccacaatatatgccgccgcatcgcggtctaataacgcatcgccatcaatgcacaccagatattcacttttcgccgcggcagctccggttttaagcgcaatggctttcccctggttttgcgccagatgaatgacccgcaggtggggaatttgtgcagccatgcgatccaggatggcacgggttttgtctgttgaaccgtcatttacggcaataacttcaatgttctcataacgctgtgctaaagcggcgtgtatggtttcctcaacgtttttctcctcattaaaacagggaatgataatggagatagacggattatctttcaactggggggctggtgcgttttctccccacggccagtggcgttcacgatagacccagaaatagacgccgccaacaatccacataatagacataaaaaacggccagaagaaaacgaacctcatcatcagttcaccagagtgaaagtacgctacgcatagggggatgcataacaccagacataatataaaaaacgatacgatgcgattaatcatttttcggataccaggctgttgaaaactcaggacgaataacgtctatttcaggttggttatgcagaaaattgtcgggataataaccatagtttttccctccattcagttgtaataggctcatccagtgagcgagttgttgcgaagaaatagcctgatgctgaccatttttctgccagttttgtgcctgtaattctaaaatagatttgtctttagcctgagggatgtttttaatttgattggtcaattgtattaaccattggtcagccgatttttctgcgacaccttccatataaggcatagccataatagcggtccagtcatagctttttaggaaatcagcataattctgtgcaaaccacgcttcactttcaggttgtattaccggaagtgcaaaaatatttcgtgcagttttaacatgtggaccgcgaatggcttttacgcgcgcactaagttctaaagtgaagtcagttaacgcacgacttttaaagcgggtccactgtttaaattgctccgggttttgtcgaatttcgctcagactcccgctaaagcctgcttgctgataagccgtgatagccggtgcactggcatcttcataatctgaaagcaaagcatcatcgtggaacaatatgccatcaaaagcagcatgtccggcaagatcttcatataacatgccaacttgtgctctgactctgtcatcgaaaggagagagacggcgatattgttcaggatgaatttgtgcttttttctccccagtcggtaagtattttactcgcgttaatgtgggatctaaatcccagcttaataccggcatccacgcatagatgtttacacctgagcgggtacgtaattgccaggcaacccgactaaaaatatctgctttcattggtagcaaacgatttggaaaccagacctctttgaccagcccatcaccatcgggatcagcaaatgcctgcaaatacacggttgatatttgcatatctttcacccgctgaattagcacatcaatattgcgatccatttgctggtggttttcgtcataaacgtaatcaagatcgatatgcattatccgttgtggtgatttttcctgtacggtaataatttgctgggcaaactcttttaatgagggattattggcgattaatactcgcggaatggaatccaattgtgacgcatttgccaaacctgattcaagggtgaagaacatgtcataaccgagtttttttaattcctctatcgctatgccattcgcttcgccataaggccaaacaaaaacgtgtggatttaccttagcctttgtacgcaggtattccgtcatttttacagcatccagacgaattctttcccggtattctgctgcggtttcataccgtgcgtggtcagtaaaatatgcacgatttacatatacaggcaataagctgccggtggcattagcctgaataccgtagtgagaattccatgtatgagaagcgacctcaacgagccgggaacgcgcaacttctcgcacttgttgccacgtggcaaaatattctcgatcgaccatctcatcgccaaattttacttgttcatccgctggcgtatcgacccaactgccgacgggggcccatacagcaggccactggaaggcctgaagaattgggaagacgcgggtataaaaactctggtagccgtcatcaaaagtcagcactactgctttttccggtagcggttttcctcctcgatgtgcttcacgaatttgagcaatactgaccggttgataaccgttctcgcgcagccaggcaaattgttcacgcagtgctgatgtccgcactgacataaaacgctggtcggcagcttcgtcttcaacgttatgccatgaaatcgccacaaaaccattatgcggccacggttgctcggcgagtaaagattcgcgatcctgtggcggtataaatgatgttcttgactggctaatgcacgcagtgagcataattatactcaccagcatcaggatatatttatttccattacgtaacatatttatccttaaaatctgaatgtcatatcgaattcaacgtataagttgtgttctctgtcaccgtcataaggtcgtttttcccagcgtagcgttgcgccagcatcaatcacgtcattccagctaatacgttgcccgtagccgagttgggtgacgacatccgtgccataatgtttttgccaggaggcaccaacacctgcgctgaagatttgctcccagctattttcatagcttcgccataacaaatgacttgcctcaaatgccggaacaatatcgaacgtttttatagggttgtagtatggagtgtcgtgttctgtattttgttcgtaatacagattgggtaggaaatcgacaatcaaatatggtgaagaccagatgcgttcctgaccctcaagtgagacttcctgacgctggttactgtcggaaaaatcagtgaaagcccaggagacaccgtacttacgccgctcattttgataccagcgaacataagcctgagcactgttgcctgtaacaccatttttcattgcccgtaatggaacgcggtgagagaggcgttccagttgcgaaccaatacgccagttatcattaaaatcataccagccagacaggcgcgcgccgggtttatgctcatgattgaaaacgcgttcagcgtactccgcctcgagccagatattacgtgaccgccactcaacacccgccagccagtcgcgaacaatcccttttccttcgctaaattgtccatcggcataaccgaatccagcaaaaccgcgccagttatccttcagcggtggtgaataaacgatggtggttaagtcgacatcatgtttaccactatccgggccttcggcatcaattcctgttgaaccagctatacgaagctctgcaagattatgtacatcaaccgcacgttttaaacgtacaacgccgggatcttgcggttcacgttcgacaacatcgtgcgttaagacagctgcctgctgccattcttgtaacgttaatgctgtccatgcttgttcaacctccagattaatattacgtggctcgatcacttctgctttttttaattcattttctgctgcacgatgccaaccgcgggcttgtaacacactcgcgtaatcaatgcgcagtccctgatttcctggtgcgttataagcaagctctctggctatcatttcagcctgaggaagatcattactatattttgctacggttgagagaaacgaatgcccctgtaaccaggtatcattcgggatgctcgtaggcgtgcccattaaccgaaggaaaggcggcgaagtattaatggtatgttgggtgacagttagcgcgccgggataattttcactctccaggtggctgtaaaagagatccgcaagttcttcatcggataaatccggggcaatggtctccttgtgataaaagagctctgtcattattgactgtgctttttttggctgctgttctttgagataagccgacgcaacccaatattgcgcccagggcggaataatttgcctcgtattttttaaacgctgatagtgagaaataacgtctttataacgatcgcgagttaataacgcgccaagatgatcaacctgaatacgctggtactgggcagtgcggtctgagttatcatgccacagaatttctaatgcagcgtattgggcgagggcgcgatcggcaatggcataacgttcactttcactgcgcgtaggcataaacgacagtctgaccagttcggcatgaatatcagcgcgaatatctggcgttaaattggcatcgtcaatcgcggcagcaagttgattattccgtaatgcctgcacgtattctgtgggatattgttgcgttaaggcattttcaggtaatgaccctgtcatcgcccgtaattcatcctcatgccgccccgccagtttatagatataggcttctgcgagtaaattagctttgtccggtgctccagagttaagctgcttaagtttaaccagcgcagaatcatagtgacccgcatctgccagggttaaaatttgtccccgttgataatccttattttgcgactccagagagagtgccttttgccacagtgtaagcgagttttgccattgttgcaggttacgataagcgacggcgacagctgcataaccacgcgctggtaattgctgatgacggtagcggttgtaaacggtaataacctgtttatcttgcccggcccataaggcaatctgtaaccagtcagcaatttggttattactgagtgctgatttttgtgcaaaccataacaaagctggctgagtatttcccttgcgagcttcgataattaatgcatcataggcgttattaacagcactcttcgccgcgggactcgctgctaaaaatgcggcagtaagaagtttcaaagcccatttggttttcgggcacctttttctgctacttgaatacatcctgtattactccatgtattgccaaaatctctctctatatctaattacaggtaactgaaaagaaagatatttttgcatctcataatccgttattaaacgcggaagagacacgtgaattgttgatgatgagaagaagaaatgatgagcagattgtccatataaaatccttttctcgcccgaaaatccattccaatgatgaggatcttcaggaatacggcataaatcccaatgcctttttcaaaataaattaggattaaaataattaaatcagtaaattccgatgcataatttcggatttttcgaaagtcctgatgaaaggcagcgctactgcactcacgaatttaattgttattcctaatgtatctattaattaatgctttataatgattttattataatcctttataagtatttgcaagcctgccttgcagcaaaaaatatataaagcattaaagtgataataattgcattctgcaactatcatcatcggtattgtttgtgggtggattttcatattgacaacagtacagttcttatatctattaataataaaaagggatctacaacctacaggttggtgtagctttatggaaaaagactatttgggaattagtagtactgtattagtgagcttattgtttgggcttgcattggttttggttaatagttggttcaatcagccaaccgttgaggaagttgttccacgatcaacctatctgatggttatgattgctttattttttatcgatactgttgcatttatttttatgcagttgtatttcatttatgaccgtaggcaattttcaaactgtatacttagtttggcttttctaagttgtttgatttactttattaaaaccgtcattatcattcagcaaattattgaggggcgtttgacaagcagtgttgttcaaaatgacattgcaatctattatttgtttcgtcagatgagtttgtgcatattaatatttctggcattggtgaataaagttagtgaaaacacaaaacagcgcaatttattttccaaaaaaatgactttgtgcataagtttgttttttgttgttggggggccgatagttgctcacatactttctagtcattatgagagctacaatttacacattgccgagttaaccaatgaaaatgatcaggtggtttggaaagcctcatatgttaccataatgattttcatgtggttaaccttgctttcagttaatctatactttaatggtttacgctgtgatatctggaatggagtgacggtgattgctttttgtgccgtactgtacaatgtctctcttttatttatgagcaggtatagcgtgtccatttggtatattagtcgcactattgaagtagtcagtaagttaaccgttatggtaatatttatgtgccatatattcagtgcgctacgagtaacaaaggacattgcacatcgcgattccttaaccaatatatttaacagaaattatttttttaatgaactgacagttcaatcagcatcggccaaaaaaacgccttattgcgtcatgattatggatatcgaccacttcaaaaaagtcaacgacacctgggggcatccggttggcgatcaggtgataaaaacagtggtgagtatcattgggaaaagcatacggccagatgacctttttgcgcgcgtcggcggcgaagagtttggcgtcttgctgacggacatcgatactgaacgtgcgaaagctttagcggaaaggattcgggaaaatgttgagcgtttaactggtgataatcctgaatacgccataccacaaaaagtgacgattagtattggcgctgttgtaacgcagaaaaatgagttaaaccctaaggagatctatcaactggctgataacgcactttacgaggcgaaagagaccgggcgtaataaggtggtagtaaaagaggcagaaattcttatcaaccgcaaggatgatgaatgagtctgtcgctagttgtcgacctccgcctggggcttctcatccccccggtctatgcaatatacgaaaaaaaagctcgtactttcgtacgagctcttctttaaatatggcggtgagggggaccgcctgaaataaatctgacttaatccaggggggttatataatttcattataaacaatgtattacactttttgttgtccgatattatctaatgtattcttagtgaagcgagagactaatggcatactggatggcataccagagtgacgggaattagcgtatggcagtattgacggatacgaaagcaagacatatcaaacctgatgacaaaccattgccccatgggggaattaccggactgacccttcatccttcttcagtaaaggggcgggggaaatgggtttttcgttatgtaagtccggtgacacaaaaaagacgtaatgctggattgggaacttacccagaggtcagtattgctgaagctgcacgtactgcccggataatgcgagagcaacttgctgcaggtgatgatcctctggagattaaaaaggctgaatctgagaaagtcgttatcccaacatttgccgatgcagccaggcgtgtacatgcagaactgtctcctggatgggaaaatccaaagcatgtaaggcagtggttatcgacgcttgagaattacgcgtttcctcaactgggagcaaaaacgctggattcgattacggctgcggacgtggcagaaacactgcgtccagtctggttaaccttgtcagaaacggcaagccgggttaaacagcgcattcatgttgttatgcagtggggatgggcgcacggtttttgtgtggcaaatcctgttgatgtggttgaccatttgcttcctcagcagacaagaggacgtgatgaacaccaacccgcaatgccctggaggcagttaccgctttttgtggcgaccagtgtgtatagtgatgaaccttataatgttacccgcgcactgttattaatggtgatacttacagcaactcgctcgggcgaagccaggggaatgcgctgggctgaaattgattttcataagcgggtatggactatacctgcagaaagaatgaaagctaggctacagcatcgtgttcctttatcccggcaggctatttacattctggaaaatatacgtggcctgcatgatgaactggtgttcccttcacccagaaagcagcagatcctttccgatatggtgttgacaagttttctgcgtaaaaagaaagccgtcagtgacattccggggcgagttgccacagcacatggttttcgctcaacattcagggactggtgtagtgaacaggggtattcgcgggatctggcggaaagggcgctcgctcatacgctgaaaaataaggttgaggcggcatatcatcgtactgatctactggagcagcgtgtaccgatgatgcaggcatgggcggattatgtgatgtctcaaattgtgaataaataatagtgaaaatgtatattgtacgatcatgatttgatatgtgatcgtggcagtagtaattaaggaaccgcttttatgtcaaatgtattgagctgataattatcagatcgtcaggaaagcgtatttttataaacaggggattactcaacaatctcctgtttataaaaaacaatttgcctgttttaacgtttcactcctgctgagactgaattattcctagtgcgtcataaatcagtcttctgcgtagtttattgtttttatctgcaccatataacataaatatattttcaactttttcttcaggtgttctgagataatggataagaaaggttatcattccaacacaatggaataaagtgaatccatcaaacaggcttatcaggtttccttttttttcccgtgctgtaagtattttttcgcgggtaagaatatttgccagttcatggggggctgatatgtttctgctgtctataatgttatttattttaccaagggctatatcaacttcctgtaataggttatttatcatagctgagtgaatgttattggtttcatgttcctgacagtttatgaacttataaatcattgagttatacagaaatattactcttcctaataaatatgtgtttgtgtcattttgaagacaggactctgggtattcgtgatccagtgaaataaggttaatggactcgccctgataagtcataaaataattgatgtcatttaataatgctcggatatttacatgatttttactgaattttattttaaatgctatctttagtatagcaaacgcggcaatgataaatccaaaaggtaatttctcatagttcagtttattgatggtgcgatgaacactttcagtctttcctgaagtaagttgtatcaaacagttaacaaattccgtatagccatttaagacataatggcatgaagaatcttttaaagtgttttctatgttttgtaatgtgacgccgttgttcaatgtataaatgtaaccgccaaagacaatgttttcaatctcaacgacacaatttattgttttttgttcaggataaagataaatatcagaaatactatagtctcgtattgcgtcaatggcctcccacgataatgcactgtcaattttcagtgtataaaatggtgagttctcattaggaaagtaatatatgtatttgttcagtgtattcattacatctattgggttggttaaatataataactggcattcatattctgaaacttctctttcgcttatcagcattttatataaagttgccagggcgcttgttaatgaagttcgtctttcgaaagccagtaatatagtgagataataacatgcaacttgaattttatctaagtcagaaattattttttccttgtcttcattacttaaataaagcagatgtttacaggtttctttgcatgtgttgatagttgcggtaagttttgtttttcctggtgtactgtttttgcgaatattacgaatgaattcatatacgccatcaaagatatatttgaaatgcgcattcgctggtgtgtatccggataaacataacttaacgtaatttcgctgatatgtccttgcagcatgatatatatcatcctcattatccggtatctgagtgagaaaagaatgaatatgatagtaaaatgccatctcattatccgggcgatatgtgttcctgatgtcgagtgcgagaatcattggtacaatgtcattaaaatatttttgttttattatttgatgtgttttgtctgtaaaaacagaatagtgcattagcttaacatagagatcttcatatctcctaaatataacttttcgttgttctgtactcaatacttgttctttatcaataatgtttattaattcatcaaacatgtcgcccagtgaatgttgatgtgaggaaaaatttttaatatttcggatgtcacgggtattctggtttttagccagaacaccaaaatatgaaaagacatcatacattatagtgataaaattatacataacattctccttttattgcactatataaaattttaacattatatcattttgcttttctgttaactggttttcatttttgaatcaatattttctgaacagggtaatagtacacgtattaacagattatgtcagaaggccccggtgatgccttctgacgatagattaatgtggtattctattggtatctggagaccatatggcaacagttacagtacattctccccgctgtaattcctataaagtgtaccattatgatcacagcacctcagatcatgagcgtttccagtgctaatcctgcaaacgtgtgtatttcaactgaattacatctacgaaacccgaaaaccaggcattaaagagcaaattgttgaaatggttcataacggagccggggttcgcgatagctccagaacgctgaaggtggatatcaacaccgtcattctcactttataaaacgctcaccacgcaaagtaaccacatctccagtcgccagtgccgatgtgacgcttatctgcgaacttgatgaacaatggagttttgtcgaaaacaaagctcgtcagcagtggcactggtatgcgtataccaccaaatctggaggtgtgctggcttacacttttggtcctcgcactgatgaaacatgtcgtgagttgccggaactcctgaagccattctccacaggcatgataaccagagacaaccggagcagttataccagagaaatgccacaggataagcatcttgtcggcaagatatttacccggcgcattgagcgcaacaatctgacacttcgtactcacatcaaacgaccagcccggaaaacgatttgcttttcacgctccctggaaattcacgaaaagccattggttcatttatcgaaaacactgtactactgactggagtcattaccagggcctcttttgctgtttttttaccaatgaatgataatgagaatcgacagcgataaggggaaagtaaaataacaataatgctgttgttttctatcgtattgatttttaattatttattgtctttttgctcagcccacttttttacgcagacaaatttacccggggaatacaaactgtaacgacagttcaccacactatgggggataaaatgccagatcaatccggatactgctggactccttcacgcatcttacggatgcctgaactgagccaattgttaggtatatctcgttcgacaatttacgaaaaaatgaatccgttatcgaaatactacgatgcaaccttccccaggccggtacgtcttggtagtggttctgtgggctggcgttcatcagctattgacgaatggcttactttacatactgtacctgccagatcagcagtcaaaggtgttaatgacgaagtgcgacatacgctttcttcagatatgaccatgagcagataagtttttgtcatcacgtgatcacctcaggaggaaaaagaagcataagaacaatttagccagaagtttaattgataaacagaatttccagcattcattgttgaaagagcagctattgtcgctattgtagcggtaattgctgctataaccgaaacgtattacgaaaaaggaagcatttatgtcttacatcaaaccggatatgccgtattcagtatatgcgtgaccatcaatgatagggaaggcaataattaaagctcaatacaataaacaagtacctctgactctggttgcaatgtcagtattaacagcgatgtcaattgcctgtcagaatcaggttgacgtatgcagtcccggaaatttacgtggggccgttaatatttacactatggttctggagaaagggaaaagaccgggggaaaggtattagtgaaataatttctggaggtattaagaatgagaaatatgaatgatatttcgtggtaaataatacagtctgcactgaattaaccttatcggtttattaaacataagatctacaaatgctctgtatttctcagagcatcaggtctgaatagcagctattttcgctattgtagcgggagttgctgctattttactaacccattaatgaaaagagaggcttttatgtgcttacttgcaccagaaaatccttatccgatatatgcactaccaccgctggtgagaaatgcaataattgaaactcaaaaaaatacacaggcacctttggctatggtggcaacatccgcattaacagcgacctcaattgcctgtcagaatcaggttgacgtgtgcagacctggaaatttacgtgggcctgttaatctttactctctgattctggctgattccggtgaaaggaaaacgaccgtggataaagtgtttatgaaagcattttatctcagggatgaagccctggcggaagaatacgcgaaactggttgagaattacagtacagaaaaggaaatatgggagcaaaaacaaaaagcgctggaatcaaaatttcataaagagattcgtgccggtaaagattacaaggcaacagaatcagagcttgaaacgcatctgaataagtctcctgttccgccgcagatacgtcgaacaatttttaatgagacaacgatagagggaatgttaaaatattactccgatagcaatcgttcttttgctcttgtatccagtgaagggggggtaatttttgacagccgggccatgagtaaactgggaattattaacactttgtgggatggaggttctcttttcatcgacaggaaatcatctcccggaattaatttgaaggagccaagactgacgatgtcggcgatgattcagcctgatgtttaccacaaaggtttttgtacgcgaaaaaaagaacttgtgaaaacgtcaggacatcatgcaaggtttttgatgtgtcaaccaacatcaacgcaggggacaaggataataaccggagataattattcatcacagtatcaggagttatttgataagaggatcaatgaacttattgatgaaagtctggctatgagtggtgaacgacgttgccttcacttttctcctcaggctgccagaatctggacggattattacaacgatgtggaatcgaagctggggggattggggcctttaagacattgtcgggaatatgctgccaaaaatgcagagtatatggcaagactggcaggacttcttcaccatttgagcagtgaggagggggacatttccccttacactgcagaaatggggagagaattagcaatatggtacggtaatgagtatatgcggttgtctaatccgttaacttttgacaacactgctcaaaacgagactatgcgactcattccagaggagcttgaacttttcaactggataaaaagctattgcattgagaaggggatcccctgtatgaaaaaaaatgacattttacagcgtggtccgaaccgtttccggaaaaaggataaaatcaactggttactggatttactgtatgaacaaaacagagttgtaccggttattgagggaaaaacgttgtgtgtcgcacctaactttgacctcttaatgacttaatcgttgagtaacatataatctcctctgctacttgcggaggagactaatgcctttaccatgtcagcgttgtattagaaaactctggtacaggtcagtcagtaaatataactggtgtaaccactatttactattggatagagtgttgctcaggatattgtcggctttagtctgaggtgaggtgggaccttcattgttttcgtgttcaataaataatttaggttaattagtattattaatgggagttatgttatctgttatgttgtctctttttatcgtaatgtcactcctctttatgctgggtattctgtatgtgcgtaatgcgtctatccccatatactacagtgtggtggtgtatggggtttagttatgtgtaaattatgttactacactcatagcgtaatattgaaaaagttaatccactgaatgtatgtctggtttgtatttaacactagttacgtaccagaacactattagagtatattgtctttagttcgtacgttatagctccgttacagtttataagtatgggtaaatataatcttttctgtatgaaataatcttcttattgtgaggttaaatatctgtaggctctctctgcagagtctctgtttttacttaatggtacggcaatactaatagcgatgttgcctgtggctattcgatagctgacttttgtgaagatcagattacttcctgtaagtgattgaatggtgctttcttaaactcaattatattgaggtgtgtttttgccattgtaattcttactggtcctctgtttaagagagcctcactgtattctgaagtattacccccattactgtaatgaggtaatacgaaacagttttatcaggttgtctgcatactggttacccagtttattaatgccgtggtacgacgtttctgtatcctcagcatttacgtaatttcctcttcctgtgagttttataaagtaaggactataaaatgtataatgctaaccccaattacgaaatgaatttcacgattctgaaagatgtgaatgaacacatggaaggtctgtttcaacgtttttctaaactgttacctttcagaattgattttgcctacaggaaagacacgcccagtttcgggcattcctgtaagcacagtatgtgtattgaaatataccgtttacttagcgaaacccagacgatgttggcaggatattactgggtaatggaatatacaccagacaaagggcttcatattcattttatcggctatctggatgggcaacgtcacaagaactcttatcagatatccaggcaactgggggatatctggaggcggatcacggaaggggagggttattttcacctttgccgggctaaagacaaatacccggtgcgtatcgatcacgtgattcactatagtgataaatctgcggtagacgacttacgttacgcccttagctacctggctaaacaggatcagaaagaacacggtattattctgaggcgtagcaggctttccgaaaaaagcaaccggggccgaccacgactgaacagtatcctgccagggatatgttctcagctgtaatgttctgaacaacaactacgggctggctcttttttgcccgtcagggcgtcaagctgagccgtgcattattctccaactgggtggacgcatgctgccagttaatggctccgctgaatgatgccctgtaccgttatgtgatgaacacccgcctgggaaccatccacggcacgtcggtcggcgaactgctggcgtggatcaaagaagatgaaaaccctagcaaaggcgagatggtgctgattattgaaggccataaagcccaggatgacgaactgcccgccgatgcgctgcgtacgctggcgctgttgtaggctgaggtgccgttgaagcaagcggcggcgttggcagcagaaatccacggagtgaagaagaatgcgttgtataagtatgcgcaggaacagcagggggactaagcccctgctgccggttttgccgggtggcgcttgcgccttacccggtctacttattgggacaagcgtttagttaatggtcaccgcctcaaacaccagcgtttccagcggctgcaacgtaatcaccgtcgcgtttttatactcaacgggcactgttttattgctgccgtataccgctttcagactaaactgcgccgcgtttcctgccggtatttcgaaatccttcgccaaatccagatagtaggtctgtggcttatccgatgggttgcgcaaaccgagaatggctttgtctttgctccaggatgcccagccgtacacggcaagcgccgttgggtcgccgccaatccagtgggtatcaaccagcacgctggcattttccttcgaccattttgcagccttcgccagcgtatcccacttcaccttgttcagcatggacggggtaatatacagctcctgcagctgggtgccggtcgcgaagtagctccagacctgatcggcaaagtcgctgtccgtttgcaccttctctaacccgtaataggcattctcggcgctgactatcccgtggtacatcagcgagttcagcgggaatagcgggcctttacgtacaatagagcggtatgtctcggcatcacgatatgttatccactgctgcaccggcgtgccggggccatacaggtttatatcatccccctgacgccagatagaatcagcatagaacaaccaggacgggctggcgttggtgccggtggtcaggttgataaatagattcgggtttgctctgcgcatattgtgcagcagagctattgacgcatcaaaatccgaggcgaacgggctaccctttatatgtgaactggcgttccccattccgtcgagtttaaacgaggtaatgtgttcatttttgataagattaatgatctgctcattgaagtttttaaagtagttcgctcccgaaagcgccagcttgccgtccacggtttcgaacccatactcttttgcatgcgaaacgcgaacgtcgcgcggcttattgtaacccccccacggtgaaagccatagcccaacggagctgtgcaggctatcggctttctctcgtactttgctaaaaccgttgctgaatgccgggccaaataaccagcgtccggtaagatcgtcccagccatcgtccagcagaaaagcgtctaacgccactccgcggccgctaatgaattccttgttccattcgtccatgcgtcccagaacatcctgttcggtgtacggagtgaaaaagccgatatccatccaactgttgtaatgcaaataaggcttgtacggacgtggacgtacggcattaataaactggttcacactgcgtcgcaactggctggtttccgggaaagtaccgaaccaggtggtaaagctaaccggcgtctctggctgaattggagttttcagttctacgttgagattggttgttgcttcataggcgtaggtattcacgatcggtttattcggcaggataaagaacgagtccgcaatgatcggtgagctagtgattgcgccgtctacgtaaggagcctgaaactgttttttggtcgggaagaaggtaatcttggcgacgtctcgtggttgcccaacggcggcaatagtgtagtcgatgctggcatattttcccttcacaaggttcaactgcactgttacgttaaaatctgggcgcgtaaagtcgatgacaatcgcattgtcctgttttttgatgtgcttgattttgaaatctgcggtgtggatttttgtctcatccggtagtgtcagaaagaacaattcctgtggtgtgatcggatggttagttctacggtccttcagcacaatcgtcgagtttgtatcatcaaacgagagggcaatattatcgttattgaacgtatagtttgctgctactgcactatgagacacacacagagccagtagtgagagagtgagcactttcttcattggtgtaagatccttatctgtaatgttactgcattcggttggtggatcgctccagccagtagcgctgagagccaaaattaatctgtaggtagttttcaccgttttgtacatagtggctgccgtcttctatgaccacgcctgcttgccgtgcgaaatgttgggttagctgcgttgcgctactctcatccgcgcttacgtctatccacgccagatacgacgattccggggtcatcatcttccacgccgggaagtgggtctggagggcatccgccagataccgggcgttgccttgcagataatcgttcagcgcgtcgagccagggcagaccgtgttgataggccagaatgattccccataccccgaacaaattgggcgaggtaatggagttcttctcaagctgctggcggaagcgctggcgcagcgagtcgtctggaatcatggagtaggaggttttcagcccgcccagctttaacgctttgttgggcgatgtgagcacgatcaggttgtcctgggcggcacagccagaggtgagacaactgacgaatttgccatccagaatgtgttcagcgtgaacctcatcgaccaccagaatcgtgccgtagcgttgacagagatcggacacctggcgtatttcttcctcgcgccagatcctgccggacgggttatgcggcgagcagaagaaccacagcgttggacggtaggttttgagctgttcttctatcagattaaaatcaagctgatagcggttttcctccacgcgcagcgggttagccagtacctgcacgccctggcgctgtgccgccatcgcaaaaggatcgtagaccggcgtgttcatcatcacgctgtcacccggtttgcagtacgcctgaatcgtgtagtgcagcgtggataccgtgccgtaggtcaacgtgatccacgatttttccacctcaacctgatgacgtttgcgctggaaggcgatgactgcgtcgtagaattcgtcaaagcaccaggtataaccaaaggtgccgtgctccacgatgcgccggaaaccgtcaatcaccgcaggcggtgaggtgaaatccatatcggctatccacagggggataaaggactccgggacgtcaccgaaacgcgagcaaacaaaggcatggtcccatttacggcacttatcactttgacgctcaatgattttgtcgaaatcaaacatcactcctcctgttaaattaaggcttcaatgccggttttgacgctctgtacctgcgctccgatgatcacctgcacgctatgcgcatcaagcatcgatcatcgcgctgcgtacgccggcgtgaaccttacggcgaatgtcatccaacgattcgtgatgatcgagatgcagtgctagcggcatgtcgtaagtgatcgaatacgcactgcacagggcgtagatctcttccagggcaatatgtttgaacgagccgggggggccccgcgaggagcacgggcgagcgcatttcgctgcacacttcgaggatcgcctggatcgtttcggcgttgtggatgttaaacgtcggtacggcgtaggcgttggcctgcgcatcctgcagaagatatttcgttgagataatgctcataaggggagcctcttaagcccgctatggatgaataatcacaccttgcaccacacggttaatcgtgccgctggcagaggggagatctggcgtattgccaacatgaatcgactgagccagcgcaaagacctgggcgtacatcaggaagcagaacgcctgttccatgtcgataaacgaacgggaaggaggcaacaggatatgcgggcccgcttcgatgatggcatccgtttccaccgcaattgcgatcacgcgcattgcctgacgatcgcggcgcagttctgtcagcagacccaggtcgtactggcgcgtgtaagggtggctggagatgtacaccacgataagcgtttcgctatcgaccagcgattttggtcgcagatgatcaccacccagaatcagcgcatcctgggggaaattcaacgagtcggcgagctgacaaacaaagccgcgaaaatcggcgggcgtcattccggtataaccgctgaactggtccacctgattggaggttgcttcaatcagtaacggcgtttggtttgcactggcgtagcggattgcagcttccagcaccagcggatgtgcggaacaaacggcataaatcccatttgttttgcccgctttgtgctgcctcaccatttctgtcagatgtttcacttgcctctccagttccgattactgcgatattaatctttcgttttgtttcagtttatactgcgtcatggtgagataaaaacaaaacgaaagttgcgggttttctgatctgattcacaaaagaaacataatgaaagtcactaaaacgagagtagcttgcgccaatgggcagtgtgggcttgcatttgcttaatagaaaggcgttaataggcaaaacgaaatgaaacgaaagttttacgaaaggacttactatgagtaataccgacgcttcaggtgagaagcgagtgacaggcaccagcgagcgacgagaacagatcattcagcgtctgcgacagcaagggagtgagcaggttaacgatctgtcggcattgtatggcgtatctactgtgacgatccgcaacgatctggcgtttctggaaaagcaggggatcgctgtgcgtgcctatggtggcgcgttgatctgcgatagcacgacgccgtcagtcgcaatctttttacggtgatcaggctgagcaatcgctgcaaaattaccacttcgatatgctgtttcttggtgtagatgcgatcgatctggagtgcggcatcagcacgcataatgaagatgaagcccgtttaaaccgtcggatgtgcgaagttgcggaacggatcatcgtggtcaccgattccagtaagttcaatcgttccagtttacataagatcattgatactcaacgtatcgacatgatcattgttgatgaaggcattcctgcggatagtctggaaggcctgcgaaaggctggggttgaagtgattctggtcggggagctcgcgtcttcgctgtgattcactatgcccgataaacaagcgttatcgggcataatacaacttgatgtatgaagagaatatcagaccaccggtgccgggttaaacactgccagctggttatgcaatccccattgatccgagaaggttttcttcttcccgctggcgacgtcgagaataaagtggaacaacttccagcccacctcttcaatggtctcttcgccggtagcgatagtgcccgcgttaatatccattaaatcaaaccagcggttcgcctgcccggtgcgggtcgccattttaatgacgggtaccgccatcaggccgtacggcgtaccacggccggtcgtaaacacttgcacggtgatacccgaagccacctgttgcgtgccacagataaaatcgctggctggcgtcgcggcgtaaattaatccgcgtttagtcgggtgttgaccgggcgacagcacttcagcaattgcggttttacccgatttagcaatggagccgagtgccttctttaccacgttggcgaggccgccctttttgttgccccgcgaagggttggcgctgcggtcggttttgcccatatcgggatagttatcgtatcaggccatctcttcgagcagacacctgcccacttcttcattgatggcgcgcggcgttaacagatgaatggcgtcgtgtacatcagtgacttcggagaacatcaccgttgcgccgcagcgcaccagcaggtcagaggcgtagccgacagcggggttagcggtaacgccggagaacgcgtcgctgccaccgcagtgcatgcccaccaccagctcggaggccgggcaggtgacgcgctggcctggttgagtttttccagatggtgtgcggcagcctgcaggatatcgtcgaccattgatttaaagccaacgtgctgttcgtcctgtaggcgtacgatgctggctctgtcgaccgggatgctctgcacatcttccgttcctttctgcaggcgctatggctgtagcttttcgcaaccgagacccaccaccatcacttcgccaccgaagtttgggttcagcgcaatattatggatggtgcgaattggcaccacggcggtcggtgcattaatcgctacgccacagccgtagaggtggttcaagtcgaccactccgtcgatgctcgggtatttcggcagcaggttgcgttcgataattttaaccacgtagttcacaacgtctgccatgcagtgcacgctggtggtaatacccaacaggtttttggtgcccacgctgccgtcggcgttgcggtaaccttcaaaggtgtaatcttccagcggcggcagcggctccggcactttggtcgcccgaggcagggggttaagcggcggcgctttcggcagcgtgaccgtggatttgtcgatccagctgcctttggcgacatcgcgtaccgcgtaaccgataacttcgccatagcgaatgatttcaccattctgaggaaggttgttatcccttttctggcgtattcgtcattccattcgtatccccggtaccggatgtttatatcgtactgtgccggtgcttgcgtgctttcctgcaggtctgcaccgatttaacaaacaaaacttaacagagtctgaaggagtagtatttcgtgcaaataaccgaagcgttattttcagagcagggagacatccggcgttttgttcagcaggcggtggaccactggacgcatctgctggcagtccacttcacactccattcggcagaaggaaatatcaacgggcaacagattcatgcattctgtacttccttttatgaacgtattactgagcgtaatcacacgaccagtccatcatcgccgctggtattacgctggttgcgggaacaactacatggaggagcaacaatacgatgcctgttgctgctcagccagacgagcatttgccatccgcgagccagtgtgacaggtgatgaagcatgttcacaactggtggatttactgcaacagacctggcgggtgataagtgctggcggacaatgtcgggtggaaagttttttttcgggttgcccggcctgatacatcagagcaatacgttgctttaaaaactgctgttcagtctctgatgctatgggttattgcaacaatcatccggtgatggacgggagaaatatcgactcttccgttagtttttacaggctgataaagttttgccagctgaatctttatacggaatactctccagtatgcgtaagagaatttgctttttggaggggggcgacaaccagatggtaaacaaaagaatggttgaatgtggatgaggttcatattcattgattcagattttttgaagaatcaccacatgggatgtccatgtggttgtataactcagggccagcgcttaatgatgatggatgtattaatgccgccaaaggcaaagttgttactctgcaaaaactcacaatcaacctttcgggcttcatgcatgatgtaatccagcgcgccacagttcgggtctggtttattcaggtttagcgtaggcgcaaaccaaccttcgcgcatcatttgcagactcatccaggcttcgagcgcgccacaggcaccaagcgtatgaccaaaataacttttcagcgaggagaccggcacattatcaccgtaaatggttgctgtcgccagactttctgccatatcaccgcgatcggtcgccgtaccatgcgctgaaatatagccgatatcttgtgcacttaacccggcgattttcagcgattgctccatacaatactgcatggtttcgcgctgtggctgggtaatatgtgccgcgtcgcagttagtcgcaaagccgacgatttcaccgtaaatggtcgcgccgcgcgctttggcgtgctccagttcttcgaggatgagcgtacctgcgccttcaccaatcaccagcccgtcgcggttttcatcgaacggtgaaggtgtggttttcggcgcatcattgtgctggctggtggcaaaaagcgtatcaaataccgctgcttctgaagggcataactcttcggcaccaccggcaaccatcaccgtttgataaccatggcgaatggcttcccacgcgtagccgatagcctgactacctgacgtgcaggcgctggaggtcggaatcacccgcccgcgcagtccaaaaaacagcccggtgttaacggcagtagtgtgcggcatcatctgcacataggtggtgccagtgatgttgttcgtgtgcttttccgtcagcatggtggcgaactcgcttaccgggccggtactgccggtcgatgagccgtatgcaatgcccgtttcgccgctggttaatatcggatcgccaatcaaccctgcctgctctaacgccagctcgctggcacgggtcgacatttgcgacacgcggcccatcgcacggatacgcttgcgggtgtagtgctccggcagcgtgaaatcatcaacaggcgcgccaagcagggtgtgcaggccgtcgtaaacctgccactccggcattttgcgcaccgcattttcatacgccagtaagcgtgcagaaacgtcctgccagttttcaccaaaggcagtcacgccgcccattcctgtaatcactacgcgacgtgtcataacatccctccattgatggaaataacctggcgggtgacgtaacccgcaatatcagacattaaatagctggcaagcccggcaacttcttccgcctggcccatgcgtttcatggggatcatcgacattgcctctttcagagcgctctcttccatttcgatcatcccggtatcaataagccctggcgcgatgcaattgacggtgattttgcgcttcgcgagttcgatagccagtgcttttgttgcgccgataattccggctttggcagcgctgtagttcacctggccgcgattgcccattacgccggaaaccgaggacagcgtgatgatgcgcccaccctggcgtgcgccgatcatcggcataatgcacggctgaatgacgttgtagaaactgtcgaggttggtgtggatcaccgcatcccagtcgtcattgcttaaagccggaaaagcggcatcgcgggcgatcccggcgttactgaccacgccgtaccaggcaccatgttgcgcgatctcgtgctccagcacttcccgacactgttcgcggtttgcgacgtcgaaactgagcaaacgcccgttacccccgttggcgacaatggcgttcagcgtttcctgagcgcccgcggcgtcacggtgatagtgaacgccaatgttaaagccgtctgccgccagttggcaggcgatggcgcgaccaatgcctttgctggcaccggtaaccagaactgaacgactcatcaggacgctccttgttgaaacagggtggtaagttcttccgcggtcggctggaaggtgttaatgcggcccgtcgcctcgccgtcgttgatgctgcactcaaaactgccgaagcgatcgtcctgcatcagcagcttgacggtaatagtcagcgtctggcctgcgggcagaatgccagcggtgcaaagcaattcacgcgcgcccagtatcatccctaactcaatactgtttttgccctgctggtggcgatgccagccagaccagacgccgacggtttgcgccatcagttcaagggcaaaccagccagggagattgccgtccgggtcgagaaacggtgccagtacgccactgggcgaaaccgtcacgcggcacaccgcgctgtcatcgctgacgctcaccacgtcttccagcagtaacatgggcgcgtcgtggggcagataagcgccgggggataaatagtggctcacgaaaccctcccgagcagaatgctggcgttattgccgccaaaggcgaaggaattggacaggatcaccggacgtgccagcggctgcggtttttcgataatgccacacggtggcagcgtgggatcgcgcggcgacagactgaagtcctgagcgggcagcggtaaatcacgctgtaaaatcaacatactaattgctgcctcggtaatgcccgctgcgcccagcgtgtgtccggtcaaatgtttggtggagctgcacggtacgcgttcgccaaacagggcgttaaccaccattgattcaatctggtcgttgagctgtgtggcggtgccgtgcaggttgatatagccgacgtcatccggcgtaagctgcgcatcggtcagcgcctgattaatagcgcggatcgctccttcgccctgcggatgcggggctgaaatatggtaagcgtcgctcgattcaccaacgcccagcaacgcgatgggctgcggttcccgggtcagcagcattagccccgccccttcaccaatggtgatacctgcgcggtcacgaccaaacggctgacataaggttggcgacagcgattcgaggctgtgaaaaccgttaatcggcatccggctcagggtgtctgcgccacccacaatggcggcatcgaccagccccgcttcgataagcctgcgcccgctgattatcgctctggcgctggaagagcaggcggttgaaagggtataggccgggccgtcgagcgccagccagtggctgagaaaacgcgacggatcgccgagttcctgttgcgcgtagtgccatgtggtgctcggctgcccgtgggtgcgcaggttaacgtgcgtgtcgccttcatgcaggccggaggtgctggtgccaagtacaatcgcgatgcgctcgcgaccatatttcgctatagcgtcatcaacctgcggctggagctgcgccagcgccgccagcaggatctgattgttgcgcgagcggtgcgcagcgaatttttccgggataagcggaagctcgccatccacgccagccaggaccgcctgcggatgcccctgcaaccagcctgcgcgcgggcgcattccgggagcaacaccgcgagtcaggttggttgcgatttcgtcaaggttatttcccagggcgttgatcatgccgacggcggaaatataaatcatatcagtcacctaagtattgaatggtgatgtggtatttaaagacatgctgctcaatgctgattggcacgcgttttccctggcgattcagataggtgatttccgtgaccagtttgccgctggcgttacgcagctcgcgtttgtcgccgttgtcgcgaagcgtccagcctgtgggaagttgcggttgccaggcgctaatcggccagtggctgagcatcacgtcagccagtacctgacttgcgggcggtaactgtgggacgacgatggattgctcggcgcgtagcccttttgcatcgtaggtcaccagaaacaggcgaatgccgaccgacgacagcccggcaagggtgattttctgatcttcggcattaagcatcactagcagagactgggttttgccgttgaagctgccggtcaacagttgctgggaattgactgcgggtgaaatccccggcgcaggcagcgtgatgagcgtaccaggttgcagccacgcctgcgggcggccttcctgttccggttgcgagtggctacagccagtgaggataagcgtagcggtcagggcgagcgctcgccagaatgtggatttgatcatttttttgttctctttttatcgggcatcgccagcggcgaaagcaggaaggcggtgaaaataccgctcaccagcacaatgccaaaactgctgatggcctgggtggcgctgaataccagcattcccagcgtcagcaaggtggtgagcattgccagcgtgatcgccagtagggaagttaacggtgtaccgcgcggattactgaaaaacagcgtgtaattgatgccgatgccaagcaccagcaccagcgccagcagcgaaaagagattcaccgcctgcccgctaatcgccagcacagccagaccgcagcccagcgaaagcaccgaaggcaccaggctgataaaccctttgcgccagccgaggcgggccactgcgccgcaggcaattactgccagcgccaccagcaacaagccggttaacacataacggtaaagtgcgaacaattcatcaaaggtgtttttgcgatcaacccaggcaatgccacaagggtaatagctggagatttcctgtagcgccgcgctatttttaaccccttcaaccggcaccagcacgccgcttgcgccattttccagcgtcagccacagcagacgccagccttcactggcggggcttgccagccattcatcaaccttcaccggcatggcgttgagatccgggttcactgttgtcagcccggcattttgcagtgcttttgttactgtcggggccgctgttgtcagcagatgtaaatcttcctcctgccgcgcaagggagttcagtggaatggtgcggtatttgctgataagcccgtcttttttcgccttctccagcgaggtggtaaatttctccagtcgccgtaatgtttgctgtggggagtcgccgtaaaccacgaaccatttttgatcgacgctctgcccggtcagggcggtaatggctttctcctgcgccagaatatgctgcggcagcgcctgtaactgcgagatatcgtcatcgacgcgtagcattgacatccccgccagcgaaaacagcgccagcgcgacggacagaccccgcgacagttttttattgcgccgccacgctgccagccagcgtagcatcagcgccatcgccggaaccggacgcaccggcaggccacggcacagccacggatgccagaacaggacggtcagacaggaggcgctcaacccgatggcggcaaaaatcgccatctggcggataccggggaagggggcgagcatcataatcagatatgccgccacggtggtgagcagcgccagcagcagggcattgcgtactttcgccaggctttgccacggcgaaacgtcgttgccgtgcaccatccgctcggtgagataatagagcgtgtagtcagcggaaatgccgataacgctcatgctcatcaccagcgtcatcaggtgtaattcaccgaaaatcaataaagtggcgaccgttcccgccagcgcgccgatgccgatggaaatcacgcaaagcaacaatgggcgcaaagagcggaacaccgccacaatcagtaatatcacccccagcagcgttgccacgcccagggttgagatatcctgcttcgcctgttgactggcgtaatcgctgtaaaataccgtgccgcgcgagagcaactgcgcctgtgggtaacgcgttttcagatccttttccagcgtattcagggtcgtgatgagctggtgggtttgctgcatatcaaacgacgatcccgccagttcaccgtgcagcagataccagtagttgccctggggatcctgcgtcaccagccagccgtccatcagccgcaaacgctggccgtttttcgccatcgccagctgcgagccgcgcattaacatcagcggatcgttttgcagctccttgccgcttaccccggagaatgcggaataaagctgggagaggatccactgcgcctgcgcttcgccgccgttttgcaggcgggcgcgggtgtcggggtcaatcaggccgttgcggtgctgccagaaaaacgctccccacgattgctggctggcggcatccattggtcctttaacgtcgccgagcgcagcggatttttgcagcagcgtcagccactcctgagcgaccctgggattagcctctttaccggggctgaccagccacaccagttggcggtccagacgctgcataaagccgtcattcagcgctgggggaatatcgcccatcacctgtttgggtaacatagccagcacgctactgttcagccgtgattgcggcagcaggatcagcaacgccgccgccatgaccaggcagactagcccccataacagcgcggggcgtttactgggcggcaaaacgttggtgttcgtcatcggtcagttgcgctggcgtcagttgatgttgggtaagagcaatatcggtgcgatcgccctgtttatcattaagttgaatgctctccagataggttttcccggcgagatcgatggtgttgaaaattttatccagcggcgtggtggtcggcgtcaggcgcagcgtccagcggccttcgcctttgtcagcaaattcgacgcggaagttttgttccagcactttgcgatcggcctggaacagcgcgcgcagcaggtggttaaactggaacatctgcgggttgttttctgccgtgatgatttgcggcggctgaccgttgatcacctgcaccatgcgtttatcatccagcaatagctgcatggggaacggtgaggtttgatcccacaataacccctggtcgcgggcgatcaacatctgaccctgagatcgcagcggctgcggcagatctttaatcgtccgggtttgatcaaaatgggcgcggatcaccggttgttcggtaaagcgttgctgaagatcgtccagggtcagggcgctcacaaacgggctaatcagcagcgccagcagcggtaaaaatttcatggtttgactcccatgcgttcaaacagaatatcggggctgacaaagcacagttcgcgactttgctcgtcgaccgcgacctgaatggtgtatccggtggtggcgcgtttgcccgtttcggcatcgaaaatctgatagccaatccgcagacggttttcgaactcttcgatatgcgcacgcacgcggatgcgttgctcaaaggtgagggcgtggcgatatttcacccgcgcatcgaccactggccacaaataaccggactctttcatctgccgatagccgtaattgaactggttgagcagcgcctcgcgggccacttcaaagtagcgaaaatagttaccgtgccaggccacgcccatcatatcgacgtcgtgaaagggaatggtcagctcgacttcagcggtaaatcggggatcgttaagcaccctttactccttgtcctgaatttccggcagttgccagaaatcgaaaaaattaaaccagtcgaggggcgactggagcgcgtaatgttccagacgcgcggcgtagtggtcgatagcgttttgcagcgcctgttggcgttcgccacgcggcaacagcagcgggtcggcaaaggtttcgcagtgaatatgcagcttgccgtgctggcgtagggcgaaaatcagattcaccgggcagcgcaaaatagacgcgagaataaacggcccctgtgggaaaggcgcaggctggcccataaacggactccagcagacgcgccagtcgccgccgcgttgcgggttgacggcgatgcggtcaccgacaatcgccacccattcgccgttatccagcttctctttcagcaggatggcggtttccgggccgatatctgttaccggcatcaggttaatgcctgcctgaggagccatctcctgcattatctgtttaaagcgttgggcgttttcgctaaacaccagcgcgttaatggttttgtagccctgaatttttgccagcgcccggcacacttccacatcgccaagatgcgaggccagcagcaatttgccgcgcggatcgcggacgtcaagcgccgcttctgcgcctggcgcaaacagcacatcacgccccagttgtagctcgccgcgccagctggcgattttgtcgagcatggcattaccgaaacgtagaaagtgctgatagctgttgatttttgctgcctgtggttgttgttggcgcacacgggcgagccagtcttgcgacgctttacgcgcacgagcagcggtgagccagtagacgcccaccaccgggtaaagcagcgcggtaaacgccgttcttcccagcagacgccagaccagcagcatcaggcgcattccccataaccctttaacttcactctgccgcgcccagtggctggaagagtggcacatcagcagtgaaggaatacgcggcaacatgccgaaaaacagacgcgtgtgcatgagcgagatgcggacgttatctttcagggcatcaaaatgcgaaagcccgtccagcggataggtgacgcgggtcggcacgaaatagctggtatttccctgccagtagaggcgcaccatcacttcggtgtcgaaatccatccgcttgccgatggtggcgcgttttgccagttgcagcgtcggcgcaaccggataaacgcgaaaaccgcacatgctgtctttcagttgcagggagagcgtttcgatccatacccagacgtgggtgatccagcgcccgtacagccgtgagcggggaatggagtcatcgtaaattggctgaccggagatcagcgccgcagggtgttgttcagcgagtgccagcagtttggggatatcttcaatcgcatgttgaccgtcagcatccacttgcaccgcatggctgaaccctgcgtctgccgctgcctgcaagccacgcatcaccgctgcgcctttacctgcgttttctgccaggcgaattaaggtcacgccaggctgttcgctaaccagattatccagttgctgttgcgtggcggcatcgctgccgtcatccaccacaatacagggcagattaaatggcttaagacgcgccagcacgcccggcatcatcgcgccgtggttgtagcaggggatcaacacgcagggagaaaagtttaccgacataggcggatcttcccgctactggcggtgtggcgggcgtcaccgtcgtgacgctgatagcagaaagtgagtacctgacttgtttcctgccatgttaattgcagggtaacagtcgtctcaggtataagtggcgccagaaatttaacattctggatactacgaaaacgccagcccggagcaagcagcgtggtagcataatgcattacccagtccaactgggccacgcctggtaacagaggctgtacggcaaaatgaccattaaaccagtagagcatcgggtcaaggtatagaacgatttccatctcctgcggttgaaccagatggcgctcaatttcatggcgtatcatgaaataactcctgtaattgcgcatagacacgcttattcatattgtttactggtatttcatcaataatgcgccagtaacgaggtactgcaacaggttcaagccatggtaatagtgctttgcgccaggacaactccagagttttccctccggagcattgccatatttgacgggcctctttatttggtacaaccacgacaccgatagcctggcgaccattgcgtattaatggtattgcagcgacatccataataccgtcaagtgccagaagtcgttgttcgatttcaaccagtgatatccgcttctcctctatttttaccactcgaccacgtcgtccgatcaggtggaactgaccgttttcattgaattgcaacatatcgtcaagcaccaatccttcagcagggattagtggcgaaaagacacgaaccccctcactttcctgtgaaagatgaacatcagaaaaagtaaaccaggggatattatcctgttgacggtaacgccatgcgagaatacctgtttcggtactaccatagatttcatcgggccatatattcagccaggtggaagttttctctacatcctgccatggtagcataccgccggcagagagaatcatttccactgggggaggcgtcagatgaaggtcgagtcgcttaaggaacgccgggctgctgacaaaggcatagcggtaggtatggcttaatgcggcaagttgctcagaataccagagcattgcggcatgcaatggcaggccaagtgccatgggtaaaaaaatacggaaagtcagcccatacaggtgctgaggcatcacggatgctacaaaacgacagcccagtagtcggtctgcaaagtgagttgccagcatgtttgcttcttgatcaaggctgataagaggttttgcaatttgttttggttgtccggttgaacccgatgtgaaaagttcaataaacgcgtcagaagcaatatcatcaaaggctatcgtgctggtcgtcatctggtgagatgtgcttacaacaaactgtggaccgttccagcccagccttttatcactcaggacgcaatcaaacaaggagcgttgtacatttaacaaagcggcgcgattatggcccgggattaccgggattttacctgagtgtagcgtggccaacaacgctacaataaaaagatagctgttttcaaaacaaagtgcccagcgattgcctggctggtcgcgtaaatggtcgatcaaaagcgctacatcatgccgcagatgccccagtgtccaggtatattccccaagccaggcaacaggagttgttacagggcgagaggctgtcaaccactgtgaaagagagagagtctgattcatggtgttttccgtttgatcatcttacgacgtatcagccattcccctgcagtcaggaaacctatcagaaggtaagcaatgataccgttccaggctgtccacaagggcatgttgccatacaaggtggtaaataacgcaatactgccattgaaaataaaaaacaggcaccagacctgcgttacgcggcgggtatatcgcacggccttttccgggaggtctggctcctgcaaacgtgccagccgctcaactatcggcattgtcgaccgcagcgaaccgccaaaaaccgccagcatgactgcgttaaccactaccgggtaaaacagcagtaactggtacgttttcaacagaaaactggagacacacaatacaatgcccacaacagcaacgatttttgtgacgacctggagcggccccgtctggcgacggggctggcgcaggcgcaataaaagcaacagcgccatcagcggcaacagccagtgcaggctgttatgcaccaaacctagccagattaaaaaaggccagacgagcagcaataatccggtcagcaacttaatcatcggtagcgagcgaatgcccgacatcaaattagccttcttgtagcaggcgttctacagcctcgacaacatcctggactgtacgcactgctttaaactcttccggcttgattttcttaccggttttcttttgcaggtgcacaatcatgtcaacggcgtcgatgctgtccagttccagatcttcgtacagtcgcgcttcaggtttgatgtcctgcggatcgatttcaaacagcttaaccagcagggctgagacttcctgataaatggtttgttggtctgtcatgatggttttcctcaggcacgttgcgcagcaatgaaagaggccagagtggcgacggagaaaaagtgctgacgcatttcttcgctttccgcagagagcacgatgccgtactcattttttactgccagtcccagttccagtgcatcgatagagtccagccctaaaccgtcgccaaacagtggcgcattgatatcaatatcatcaggagtcaagtcgtccagattgagggtgctgatgatgaggtttttaatttccagataaagcgcttgcattatttattcctgatagaggtaaacaaccttgctgtaattgaagcaaaagatgccggtttaactgtcttgcagccagcgtcggctcttgtgaagttgcatcgtaaaatttattgatttctacccgcccatggacttcaaccgtaaaaaacggcctggcaggcgggacgtcataccacttactttgtttatccagcagatgctcgctacagccgatcgtcacgatgcgtaaatcgctggtgcagcgcacggcaatattcgctgcaccgcgctgtaacgtcattttttcaccgggcttcgttcgtgtgccttcggggaaaatcaggatagtgtcaccctgtgccagtcgctgttggcagcggggtaacagggtttctgcttcgctgttgattaaataatctgccgctcgcacgacgccgccaagaaaaggattttttaacagcgcgcttttcaccaggcagtcagtttctggcatgactgatgccagcagcacgtaatcgatcagcgtgggatgattggctacgacgaggcaaccgcgttcctgacgtaaaatttcagcgccatcaatacgataatccagcacgccaagccctttcgcgacagttaaaaacaggcgaaaactggcggcaatgctgcgacgtgccaaacgacggcggcgggaagtatcccacactaaaactaacaatatgttaaaccacacgactgaaagcagcaggccgccgagaccaaacaggacaaaacataacccggtcatgaccagtcgccatgcccatcccaggcgcgacatcagcttactcatctgcggctccagcgccattgcacgcgctcgccaggcagtgaaaaagcatctgcattttgtaaatagtgctgtaaaaacaacatgctttgcggcagtgttgtttcatttaccgcaatggcttgctgcgtttcacattgccagtcatcgccagcttcaatcaccagcgcgacggcgtacggccaggtaggcatttctgcgggcagttgcgggtgataaaactcaggtagaaagccatcaaaatcgaccatcaacacgcgctggtatcccgcttgtagcaggctaagcacttcacacaaaccttgctggaaactgtcgcgaccagccgaaagcgatgacgaaacgatcggctgtttggccacaatggtcaggttacccacggaagagttgtgtacggaaagcgcgaagtccgtcggagaaagcgcctgttcggttgccagtgcatgaacaatgcggtaattgcgctccagttcgccatgacgactggtatacaaaacagcgtctggctgatggcggcgtagcattgtcagaccgcattcaacagccagtttgctgcctgaactgagacgacgagcggtcatcattggcagttcacttaattttgccaacggcgcggcagggtcaatcgcccacggctggcgcgaccatgcttgccattgctgcacatcgctaagtccaggcgccagtgcctgccagttggtaatatttaatgcaaatttcatcaacgcgcgcccgcggtaaaccaaaattattaagtgacgattatttcttttggcatatcaaaagtgtatgcccaacgcctaaattattgtgacgctctgctacctggaatcctgctttattcagatagtcgtaaaatttctctgcactatagaaacggctgttaccgtttgccatgcaggtaaaataaagtgaggatgcattcaggctaaacgatgtcgcttcaaaccgctgtgcatcccagaacaactccatgatgcaaagttttgcgccaggcttcattacgctggcaattttgctgagtatgctaattatttgttcgggtgaaaaacagtctaaaaattggctcatccaccagatatcagcctcgcctggtaatggtgcatcgcttagcatatccaccgcatggaaatctatgcgatcagaaaaacctgcattcgcgatattttctttcgccagtacgatttgttgtggcagatctaataacgtaacggcgatgttttcattgaatttgcagcagcgcaaagcccacttacccgtattgccacccacatcgtacaaggttgtggggttgttggcgaatacataaggcagtgcggcgttaaatgcgccatctgaatagtaatgatcaaacgcaaaccagctatcacgtgcggcgtctggtaattgcgaaagtgccggatatatcgtcggccagtcgccaaatacttttaacccggaaggttttccttcattgagtgaatcggcaaggaagaagagcccctggtaacagacatcctgggtgaaatccatattcacgcgagtcatagtgtcatgcaggaggtaatgaccgattttcgccaggtaataaattccctctttacaggtaataattcgcccgcttaagcccatatccagtaacacacccacggcatattcattcaggactgtgtgctcagtaatcgcattaaggggagctccctgtttaccctgttgatccaaataatctaatattcctgcattgcgcaggcacaaagctgcctggaaaagcataggagcaaaggcaatccgctgtgcttcggtgatggcatccagtgcgctgagcgtgtcctgttcgtacatatataaccattcttatagagaaagttaaatactatcgggccattccagcccgatatcagcatcactataacgttgctcctgtagataagttaacctgtatatctttatccaggttacgcacccagcggttatagtttttatgaatttttccatcagaagcctgcagattcaggctactgtcatatttgatgttatagtaggtagctgtatatgtaatacgaacctctgcaacgtgatttcgtgtttgatagcgagctttaataactccaggggacacttgcgtcataatccacttgcgctgcgcacctgctttcaaaatggcatttttaacctgctcctgagtatgacccacactgacagtggtgcttatctgttgcactggggccgtacggacacaggcactcaacatactgataaaaattgtgatggcaaaccattttatataacgtttcattagtgcctcttatgtatgcaatacaattatataattaaatagtaataacagacagtatatctgtataaatcccagacttcttacccgaaatatatttggggttatattggattgtcaatgtctggttgtgacagggaccaaagatatgccggtatcatttttgtaaatggcttgtgaggtggagagccctctgcggtaagctccctcgacattccttttttatttatccgcagatattcttattctgatattgataaaacacggggtatggattgagactgaacagcttgttgtgcccggttttaatggtaaatgcatatgtgtcccagaattgatattgacttcctggtactcaatattctgaaaagctgaagaaagatcacgtttttgacatttttttgatgtcttgtcataaaactgtttcatgacagactttttcaggtgtaaattttctcgctgacactttttgacatgaatttacactggcatcacacaggccagaatacggggagaacatgcagcgccggcagaacaacattctgacgaaaacgtcccttttatcccgtgcgttgtctgtcccctgttgtgatatgttccggcgcggctctccgtggatatgctatctctccctctccgttttttctggtttttttatccccgcattttcgtctccggcagccatgctgtctccgggtggccggtaccctgctgaacagtgcgctgatttatgcggggaataacctgaagctgtttacagaccgtctgcataaccagcatggtgatatcctggccgacaacagtctgtgggtacagaaggacagcagcgggacggcaaacagcgaaatcattaaccgttccggtaatattgaaaccatgcgtggcgatatcaccatgaatacggcgcatctgctgaattcatgggatgccatttcggccagccatgaggtcattccgggcagcagccgcggggtgatttcaccggttccggaaaataaccggtggtggggtgttgtccggcatgatggtgtggaatatctggccgtgtactggggtaagggtgccacggtacctgatgaataccgtatccgtacgggagatacggatacggtgacagtcagtgccaccggccatgctgccaggatatccggcggcgctgatatgcatatccgtgcaggacgactggataatgaggcatcgtttattctcgccggtggcagtatgaccctgagtggcgacacactgaacaatcagggctggcaggaggggaccaccggaaaggaaacggtctggcggcttgcctccgactcactccccaaagcgtggtttactgagccatggtacagggtctatcgccaggtctcgccggatgcgacagaagccagtggcacctctccggtaggtcagtaccgtgcggttatcagcgctgccggtgatgtgtctgccagctttgccactgacaccggtaataccactgtcatgccccgggcaggtggttcaggtaacacgataacggtgccttcgctgaactccctgacaccaccgacggtcagtcagggggtgagcggtgaagccctgctgaatgaaagcggtaccgggataaccggccctgtatggaatgacgcgctgccggatacgctgaaggatatcccgggtgcgctgtcgctgtacggggcaagtgtaagcagctatcccctgccatccggtaacaatggttattttgtcccgtccacggacccggacagtccgtatctgattacggtgaacccgaaactggatggtttcggaaaggtggacagcagtctgtttgccggactttatgacctgctcaggatgcaacccggagaggcaccacgtgaaacagacccggtgtatatcgatgaaaaacagtttctgggctcatcgtacattcttgaccgtcttggcctgaaaccggaaaaagattaccgctttctgggggatgcggcttttgatacccggtatgtcagtaacgtcatactgaaccagacgggctcacgttatatcaacggcacaggctctgacctgacgcagatgaaatacctgatggacagcgcggcagcacaacagaaagcgctcggactgacctttggtgtgtcgctgaccgccgggcaggttgcacaactgaccagaagcatactgtggtgggagtccgtcaccatcaacggacagacagtcatggttccgaaactgtatctgtctccggaagatatcacccttcataatggcagcgttatcagcgggaacaacgtgcagcttgcgggtggcaatattaccaacagcggcggcagcatcaacgcacagaatgacctcctgctcgacagcacaggtagtatcgacaacctgaatgccggactgataaacgccggtggtgcactgaacctgaaggccatcggggatatcagcaatatcagctcagtcatcagcggtaaaaccgtatccctggaaagcgccaccggaaacatcagtaacctaacccggacagaacagtgggcgatgaacaacggatataaccatttcagcggaacggataccggtccgctggctgctgtcagggcaacggactcactgtttatgggcgcagccggggatatcagtatcaccggtgccgccgtttctgccggtgacagcgtgttactgtccgccggtaatgacctgaacatgaacgcgatacaggccggagaacgtcgtcgctatggcgggtccgggtggtatgaaactcatgccgtggcccccacggtcactgccgggaacagtctgatgctttccgccggtcgtgatgtgaacagccaggctgccggtattacggctgaaaacagtatggatatccgcgccggacgggatgtgaacatggctgcggagtccacaggcgcaggtgaccacgacagcactttcagcatgaagacggttcatgattcggtccggcagcagggaacagacatgaccagtggcggtgacatcacggttactgccggacgggatatcacctcagttgcgactgctgtaacggcaaagggcgatatccgtgtgaatgccggtcatgacatcgtactgggtactgccacggaaagtgattatcactacagtgaatcaggggaaacccgcaaccgtctcctcagccatcagaccacccggaccatcacggaagacagcgtcacccgtgagaagggctctctgctgtcggggaatcgcgtgaccgttaacgccggcgataacctgacggtagagggttcggatgtggtggctgagccgggatgtgtcactggcggcgggtaatcatgttgatgttcttgctgccaccagtacagatacgtcctggcgctttaaggaaacgaagaaatccggtctgacgggtaccggcggtattggtttcaccattggcagcagtaagacatcgcacgaccgccgcgaagccgggacaacgcagagtcagagtgccagtaccatcggctccactgccggtaatgtcagtattaccgcgggcaaacaggctcatatcagcggttcggatgtgattgcgaaccgggatatcagcattaccggtgacagtgtggtggttgacccggggcatgaccgtcgtactgtggacgaaaaatttgagcagaagaaaagcgggctgacggttgccctttccggcacggtgggcagtgccatcaataatgcggttaccagtgcacaggagacgaaggagagcagtgacagccgtctgaaagccctgcaggccacaaagacagcgctgtctggtgtgcaggccggacaggctgcgacaatggcctccgcaaccggtgacccgaatgcgacgggagtcagcctgtcgctcaccacccagaaatcgaaatcacaacaacattctgaaagtgacacagtatccggcagtacgctgaatgccgggaataatctgtctgttgtcgcaaccggcaaaaacaggggcgataaccgcggagatattgtgattgcaggaagccagcttaaggccggtggtaacacaagcctggatgccgcgaatgatattctgttgagtggcgccgcaaacacacaaaaaacaacgggcaggaacagcagcagtggcggtggcgtgggtgtcagtatcggtgcaggtaaaggtgccggtatcagcgcctttgccagcgttaatgcggcaaaaggcagggagaaaggtaacggtactgagtggactgaaaccacaacagacagcggtaaaaccgtcaccatcaacagtggtcgggatacggtactgaacggtgctcaggtcaacggcaacaggattatcgccgatgtgggccacgacctgctgataagcagccagcaggacaccagtaagtacgacagtaaacagaccagcgtggctgccggcggcagttttacctttggctccatgaccggctcaggttacatcgctgcctcccgggataagatgaagagccgctttgactccgttgctgaacaaaccggaatgtttgcccggtgatggtggcttcgacatcacagtgggtaaacatacccaactggatggtgcggtgattgcctccactgccacaccggataaaaaccacctggataccggaacgctgggtttcagtgaccttcacaacgaagcggattataaagtcagtcacagtggaatcagtctgagcggtggtggcagcttcggggataaatttcagggtaacatgccgggtggcatgatatccgccggaggtcacagcggacatgcggaaggaacgactcaggccgcagtggcagatggcacaatcaccatccgggacagggacaatcagaagcagaatctggcgaacctgagccgtgaccctgcgcacgctaatgacagtatcagcccgatatttgacaaggagaaggagcagaggcgtctgcagacagtggggcttatcagtgacataggcagtcaggtggcggatattgcgcgtacacagggagaactgaatgcgttgaaggccgcgaaggaagcaaccagcgaaacacttcctgctaatgcaacagagaaacaacgccaggaatatcttgcgaaactgcgtgacacgcaggcttacaggaatgaaatggcgaagtatggtaccggcagtgaaattcagcggggtatccaggccgcgacagcggcgcttcaggggctggcggggggtaatttagcaggtgctctggccggagcttcagcaccggaactggcacatctgctgaaatcaacagaaaaagacccggcagtaaacgccattgctcacgccattctgggcggcgcagtggcggcaatgcagggtaataatgccgctgccggtgcagcaggcgcagcaacgggagagctggcagccagagcgattgccggaatgctgtatcctggcgtgaagcagtcagacctcagtgaagagcagaagcagacgataagtacgctggcaaccgtgtcagcagggctggccggcggtctaaccggaaacagcaccgcatcagcagcagtgggagcacagagcgggaagaatgctgttgagaataactcactcagtgctggctggaacaatatcctgccatcaggaacacaggattacggacaggccgtagcctcgtggaatcagtatgctcaggacaataatctgacaccggagcaggttcaagaagggatgaatcgtatagctattggtgaagggccttcttgggggacaacatataaagtacacccggtagttcaggctggcggtgatgttagctttatccggggttatactttaagcggaactatagatgacaatcatatttcagttaatcaaggggatatttatagtataggtgctcatggcggagcctcgatcggattatcctttggcccgtatttcccgggattaataaattcaaatgataacgattattcgataaatggtggttttggcgttggtgcagtggggctttctacgggtaaagatggtgttagtttcacttttggttttggcccaagttggggttggagtgcaactgaaattaaaggcgttgacgttaatggcacttcaacaagtgaggtttatcgatatgattttaaataatttttatagtttactatttttattgatgcttgcgctgtcaatattttccttcacagtgctatttgctttgtttatatataaagatctcggtggtgtaaaatttgcccgggactcttttttgttttttgattatatattttttagttctgacatgagagcaaatgcctctgcactatcggttatctgtgtttttatatttggattggcttttgatcataatcgtaatccacttgttaagaattacttggtcgatatagtatggtttttaggtgttgttttattttttatacactgtcgttttttttctaatctggaatatggtaagacaaaaattatttttgtaagagagctttttttcaacctaaaaataaaactaaggttaatatttttatggttgtcacgattattattcatcatattgatattaaatcgtttttatcgttgatttgttgttgagaataatttacttggcggtagtgaatatgctcatgctgcgtggatacgccagcatggtatcgacatggcgacatgtacagaaaactcttccggtgccgcctgccagaaagcaatgaatgagagggatgctgtagggctggctttggcaacaggtactgtggcactactccccggtagtgctcaggtaatgtggggacttggagcaagtgcgaatgctggtatcagttatctggctgatggtactgtagatccggcaaacgcagccattgcaggctggggaatgtgttcagcatgggtaatggcctggcggggactgtgggctggaatgctgcaggtggtgcgctgggtaactggatcggcaacaaagatcctctgtctggtgcaatttcaaatggtatcggttctgctgcgggtatggtatcggtaaaggtattacttaggggacagataagattacgaatgctgtaggaaaatgggtgacaaatggctgggatcctaagtacgatccaacatggataaaatatgctgaagtaaatcgtaacgatatcattcgagaaggcatgaaaccgagcaatattcctggaactgctggagatattggcggttctataggatccgagctaggtggaaaagtaacagataaagtatctgaggaactcaagaaatgaaatattcttttctgcgtggatacgccagcatggtatcgacatggcgacatgtacagaaaactcttccggtgccgcctgccagaaagcaatgaatgagagggatgctgtagggctggcttggcaacaggtactgtggcactactccccggtagtgctcaggctatgtggggacttggagcaagtgcgaatgctggtatcagttatctggctgatggtactgtagatccggcaaacgcagccattgcaggctggggaatgtgttcagcatgggtaatggcctggcggggactgtgggctggaatgctgcaggtggtgcgctgggtaactggatcggcaacaaagatcctctgtctggtgcaatttcaaatggtatcggttctgctgccgggtatggtatcggtaaaggtattacttaggggacagataagattacgaatgctgtaggaaaatgggtgacaaatggctgggatcctaagtacgatccaacatggataaaatatgctgaagtaaatcgtaacgatatcattcgagaaggcatgaaaccgagcaatattcctggaactgctggagatattggcggttctataggatccgagctaggtggaaaagtaacagataaagtatctgaggaactcaagaaatgaaatattcttttcgagtggtaataggtaagtttattatatgcagttcaattctcttattgtgttttattggcatgatcttagcggccataataactaaactaacgtttgtagcgttagcatggtttcaaagcgggatttttgaagttttgtggagcgatattgtttatgctgctcagttgggtggtctggggggggggcatattaggtttttgttgggttttgttatatctttttagggcaaagggctttagttgagaataactacctgagcgtgtctgaaaagacagaacttgagatagcaaaacagacgcttaaaaacagtaaagatccggcagaacgtgaaaaggtacagcagaaatatgatgcattgcttgaaaaagatattgccagtgataaggaggttattgctgcctgcagtaatggtaatgcgggtagttcagcgtgtgctagcgcaaggctgaaagttattgcgtcgaaagaagggtacgaagatggcccttataactcgaaatacagccagcaatacgctgatgcgtatggccttctgccagcgctcgtttttccagagcgtgccattcagctccaactcgtgtcaggcgtagtttacgcaggctgcgttcaaggtgatggatattgctcactgcgaacctcccttgccacgcagtagttgctcataactgctcaggttatgctgtatcacattgactactggcaacgccttttcctttatacccaggaagcgcatcagccggtgcagatccacgtttcccgggggattcaacatctgctccataccttttgccacgactgagatatcgtcgtatcctgcagccagtttcagggcatgtaccatcagccttcctgccatgtcggactccagatgattacataagcgacgccacagcctccgcaattcatcgtctggcaggatgtcatttctcagcgttgcatggcagaacgcaccgggcttttttgccagactgtcgatcacatgtcggaagtcgatacgacgggcccgcgtcttccctttttctggtctgacacgagggcagctcatgacctcgctgctgccaacgtaacggctcagacgatcgtcccataaccggacccgtaacagttgacctacaagccgggaaggtacgctgtagacgatgtgcttcacattgatggtactgctgcggctaaccctcacagtcagcactgcgacgaagcggcagcggtttcagatgaagacgttcttccttgatcagatcatgattgttacggttgtgccgcataacctgctgagtgatgaaggcctgatattcttctatggtgctgaagtcgttactgccccgcagtatcagcgcctgacagatacgccttttcagatgcccgtgggcactttcaaccgagccattttcgtggccccgaccggaattattatgtacgccctgcattccgtagtgctgacagatagcagtataacgctcagtcagctcgcggcgtccatctccgcccagttgtccgagggcttcctgcagaccttcagccagagcagagaagctcttaccacccagcacaacccgcatccagctccagtggctccattccagacggaagtgatacaacttaccgacgatggtgacaactacacctttcagttcagtaaagtccgacaggcctcgcagaccgggctgatgtcgctggcggaacatgacctcctgctctgcactatactgtagcttccattcgcgaacccgccgttgcattgttcttcgaaggctgttgggatactggccgggatatttatcctgtagcatctccagcagagttgttggtgtcagagccggcctctctttcaacagaggaacaagcatgctgtcccacatagcttccagaggaagctttgcgtgtgcgccagtgccgaacactgttgttttcccactctcctttttcgatccgacgaccagaatggactgagataccagccttcatggccgagatatgcggtcggtcaggtggtatttgaaaccagactgaagcccacggtcgtcatcgggacgcaggccgccgccgtgcatggtatcagtgagcaggcactctgcggagcaccatcatggactgatgtggtgcggcaactgcgtcatgcaatcggggaccgaccagtaattatctttaatgcccggttcgacatccgcattctgaaaaagactgctgccgcacatagcgatccggctgactggctggaagaactgacggtatattgtgtgatggagctggctgcaggatattatggagcctccaaccgctatggcactatttcactggcctgtgctgccagccagaccggactgaactgggaagggcaggcacactcagcgatcgctgacgcacggatgacggcaggggtggtaaacgctattgctgcatatcatctggaactgctgcaggaacaggcacggctgaaaacctgactgcctggcctgtataccgcaatcatttacgttatccagacgtaaatatatcaataaatagcaatcccccagatacctaatgtagttccagcaagcacggccgggcagcttgttctgcctgcgttttcttcaattgagcagtagaccatttagctgtggcatgaatggctgcagaactttcactgttgctacctccagttccaccaccgctgccagagccactcccgtctggattatcattcaaaagagtaatgattacctgccccttatcatcataaggaacaccatctttatagtacgctacagctgtttccattataaaatcctctttgacattaaaaacaatcagttaaaaataagtactgcatatataattactggttttatatacagcataaaaattacgccgctgcgttttccctgtcaaccctgtggattttcatttttgtgaaaacgatcaaaaaacaactactcacaattcgacagtcccgccagataccgcaaaaccggccagacgttaccgttttccgggaccatgatatgagccccgttggggagggtatggagttgctgaaaatgacggtcagattgagttcaccgttttattgttacaggaggccagggcttgtctgctaccggtccggacgagagggataccgggaatttgaatccggttaactgagccggacatacggtaaataaggaatgcaggcagaacgggagtcactgcaggatgagaccggcactacagcagaaaaacaggtgattctggtacggctcagccactaaacacagttggaaactgatgataagatagtcagcggttatataactcactgagtaaaaagatataaaggtaaggagacactcatgagtcgttccggtagcacactgtatcttatcgccctgctgacagcggcaacggtcctgacagcctgcacgccaaagggcagtatggaacaacatacccggcattacgtttatgcatcagatgacggttttgatcctaacttttccacccagaaggccgacacaacacgaatgatggtgctttttttcggcagttctgggatatgggagctaaagataaagcgacaggaaaatcatggagtgatgtgcaacaacgccttcagcagtttcacagccaggaatttttaaactcactccggggcacaactcaatttgcgggtaccgattaccgcagcaaagaccttaccccaaaaaaatccaggctgctggctgacaccatttcagcggtttatctcgatggttatgagagctgacagtgacggggaacgttgcgggggaataaagatattgggggtaggctgagccccagaatatggtacctccctgcccctccaatattcggtgatggccggacaaggagtccaggagagggggattagtggtggatctgcgccaggtcgtcttcagtctttatgacgctattacggtcaatgccgttctgcagcatggtacgggtaattttcagagtggcttggagctcactttctgaacgacttattagcgtgtgctccggtgatttgcacatgcgcaaatctttcagcccaaaggaggctaatcatcacggcgattacgttcaaatcccccgcgccctcttgctgccaattcagcattgagtaccacgtaacgctcccagcgttcacgcaactgtgcgagctttagcggtaattctttggtgacaaaggcttcctgtatttcaaagtcatcaagatgcccttgcagatatgcatgtacgccttccaacacatcagtcagagtgatgttgttactttgttgcctttcaacaagcggcccctgccagctatgccagaaggcctgatggcgcagacagctttcgtcattcgcgagcaaccacaaatccataaagattcctcgtgcaactttgaacggctatttgtcaacgacggatgaaaagtggctcttccgcaacttgggtggagattttcatgccagtggactcatgaccctctgcctgagtagttcaaatccggctctaccatacatctggcgttttagcatcttcaggcgatttacatgaccttcgacaacaccattactccagcggctactgattgcctcacatatagctgcagcatcagcttccatccccgccgccacgcgccgaaattctgctgaaccgctttcgtggactcgagtgaaccagctacttagctgtgatttattttgggttttcagaatacggtagaactcgagtgccagttgctgcgctattttcagctccggttctttttcacacatcagactaataaatcgggaagcataattttcttcatccctgattattctccagggcatcaaccagcgccttacccgggacattgaaggaagtctgacggaagtctgacggcagtagtaaccggtgggttccagcctttacgccatttggcaatagcatccctgacaatggtttcactgcctgtaaacccccggaccaccatttcccgccattatccggctggcgttataattcccactttctcgttgctcttttaaccactccctccatgggtccagaagccctcgctttggaggtcgggttgacatttcagggaatgttcctgaacgtacccagcgactgactgtcacacgcgacaggcctgtaatacgggatatttccctgaaactacatcccttgttatgcagggccataacctctgtccaacgctgatgccgttttttgcggggttgctgttttaggtgttccggacgacggagcgatgctgcaggcacagatggttctggatcaggtgatttctttggtgacaactcactggcaacaagacgtatcagaggcatatgtcggtacatcattcgttcaggcgcatcgccaatattttttagcaggtgccatcgatcggccacctgtctggcctgaggtgcaccttcacgtgctgctgttgcatagactccactgcgatcacgcgagacaacctgtatttccggatattttctgaaccaggtcgccagcgtacgctgatcacggccgggaagcaggacgaggggacggtgagtatcaagattgacgattaacgtactgtaacggtggccccgatgccacgcccactcatcaataccgacatgaggcgcgcctgactgtttcgtctccggggtattgataaccctgcgaagaagagtatcagcactgcaacggagacccactgccgttgcaacccgtttcccggcctcacctccggctattaatcccagttgacgttgtaaattttgtaacgcctgtgaagactgctggtgtgaaccggcgaagggagcaagcgacccggcaaaaattttacgtgaacaagccgggttacggcagtaccagtggcggacggaaaatacaagccatagcgtatgcccttagcagggtagatgctgtatccggcgccgacgacaactatgaacagagtcgctacgcttaaagcattcaggacattgtgcagtttttcgttttccgtggagatggagggttataccgtcagagctaataatttgtcgactgcatcgccatccgcaaggtaactgtagaagtgtcttaagagagtgcattgagttgcccaaaacttaaaacagcttagatctttgttcaccagaaagtttcatccattttcttccactcaggttgcagaagaaccacttttgcaccgttcgtgacattaatctttaaaacggcaaggtcaatacccagttgttccgccactattgtgataacagccttcggggggagcttttctgtacgcagtgtgcgaccgagagcacggacaagtgcaagctgaatggcaaaaccaagacggttatgagaccgccgctgagctctggcaaatgcaatattttcgcaggagagtgctcatcggggaattaaagttcaggtaatccaaaaagcgtatcgtgcgagtttgtcacgcaagaaatcacagatttatagattcaattttcttcaactgtaggaccttacggaaaacaagtgatttcaaggtgaaaaggcttaacgtgagttatcgcagaaatggttacggaacatcctgtattgtcaaacatgcattaaatgattatcattatcaattagtgtgtgcaatagatggttaagaatagaactttcaggagatacaatgcagtcagtcagtaaatcaatctaccgagggaagttgcttagcagtttacctgctgtgggcgagattcataaagaaatcgcagtatcagaagaaaccgtaacatggatctctctgcaacgagagattatagcgaatattttgctgggaaaagatcctcgcttgcttgtgattgttggtccatgctcaatccatgacgttcaggctgccgttgaatatgcgaaacgattgtccgtattacagaataagtacttatcgcaaatgtacattgtaatgcgcacttattttgagaaacctcgaactcgtaaaggctggaaaggaataatgcacgatcctgatctaaatggaagctataatgttgagaaagggatacgatatgctcgccagtgtttgtcctcaatcacaacaatgcgtgtcgcaaccgctacagaattcctcgatcctttccttactccctatattgctgatttaatatgttggggggctgttggtgccagaactactgaatcacaaacgcatcgtcaacttgcgtctggtttacattgtcctgttggatttaaaaacagcactgatggaaatattaacttagctattgatgctattcttgcagcccgtgaacaacatgttgtatatatgacatctttaacaaaatgtatatctaccctattaaccgatggcaatccacatggacatctcatattacgtggtggtagagagccgaactatggtttgtcggatataacgaaggcagtgaaattaatgcatgatgaaggtatcaatcatcgtctgataattgactgtagccatggtaatagtggtaaagtggctgaacggcaaatctctgttgctcgtgaagtcattgataatcggaaaaagatgccgggatatgtagctggaattatgctggaaagctttttacaaggtggaaaacaatcagacagccttccgcgagagtatggtcagtctgttactgatgagtgtctttcatggcaacagacagaacaattattatcaactctggcagcacaactttaatttcaactattcagtatcattttttaagggaaaaatgaaattatttatcttaatacacccaatctgggcatcaaagaaacagatgttttatctgtacagttcattgttggaagggaaataaaatatgacatgaatggcagaagtgttatcactctgacattaatatttttattaggagttgcagtatttctaatataccatctccaatggatgtatcttccagggtattatctgtggggcctatgtgtatgtatattgtcaaaccagttagctcttatgcttcatttcctagcccttcttggcaaatgatactgtacttgcgtaggtgtcatctgtgacatggttgcggtgctattttgtctctgttggcttaaaaagagtaattaagactatgataaaaagttaatttccaaagaacacgatagggcgctaatcaataatcggatgcatgctaaatcatattttataatatgtctgtggagatgatgctaaagtcatcaatagttcttgaggaattcattatgactatcattggtatcgttcttgccagaaacgtcttcgctgttcacaatgttgcgttaaatgagaaaatgttctggtaaacccccggagagcacatgcagtgctgccagccctgattgtacttttacctccctgagttatgggtaccttgctaagggagtattcaccagtgaacaacataatacaaagtagcgtaaaccttttgttcaaggtcagtcagggtatctcatcggaatggtgtgcaatttaacatcgctgcccagcatgagttgataggcgtgaccgtgatccgtaccgtgggatgtgagtttcatacaggtaatatgatcctacccacgtaatgtggacacggtcctaagcgagattatggttttcaaattgttccgggctgagaccgccacaggcactgtgacgacgccagcgattgtaatcacactcgatataattaaacaccgttgcccgcattatttcccggctgctaaagcgttccccgtggatatattccaccttcagcgaatgaaagaagctttccacacaggcattgtcataacagtagcctttcgcactcatactgccacgcaggttgtgtcagcttcagcagcgcctgataatcccctgaacagtattgaccaccacggtccgtatgaacaatgacgctttccgggcgtcttctccgccacaacgccatttgcagtgcatcacaggccagttgtgctgtcattcgcagtgacatcgaccagccaatgacggcgcgtgaccacaggtcgatgactactgcgagatacaaccagccctcatcggtacgcaagtacgtgatgtcacccgcccacttctggttcgggccgctggcgctgaagtcctgctccagcagattctccaatacgggcaggccatgtgcacggtagctgaccgggctgaacttccggctggctttcgcccgcagcccctgacgacgcaggctggcggcaatggttttaatattgaactccggcatttcgtcagcaaggcggggagcaccgtatcgctgctttgcctcaaagaatgccttatggacagcggcatcgcaggtgagccgaaactgttggcgcaggctcatctggtgacgacgccagagccagacataccagccgctgcgggcaacccgaagtacacgacacatcgctttgatgctgaactctgcccgatgattttcgatgaagacatacttcatttcaggcgcttcgcgaagttgtcgcggccttttggaggatggccagttcctcagcctgctccgccagttgtcatttaaggcggacattttcagcggccagttcgctttcgcgctctgacgaactcatttgttgctgctgtttactgcgccaggcataaagctgagattcatacaggctgagttcacgggctgcggcggccacaccgatgcgttcagcgagtttcagggcttcgttacgaaattcaggcgtatgttgtttacggggcttcttgctgattgatactggttttgtcatgagtcacctctggttgagagtttactcacttagtcctgtgtctactattggtgggtaagatcaaaacccattcatacctatagaaaaataggttgttttttctaacgattgttgaaggggaggtggatctgatgaaaatgcagcggatgttaatattaacatcatacttattataatctttttcgtaagatacatactttcccctttggttttccatcgataaatgttcagataaacaatatatgttttttcttgttaatgtttatatcgatggttttataacatgaaatattcagcataataatcaacaggcttgtacctgatcaggtatcagtttgcaaaaatgtttgttataggtcatgaccgcaaccaggacacataatttcaccacaaccacaaatataatcggcatcatagtcatgtgttactataccggaagccgacttattatttgtgatacagtgtgtctcctgctctacggaggattctacctctataggaaaattatcgtgttttcgtcttgaattgtcttgcttgttgcctttatcaaaggtaacaatgaattcttcatttctgtgattattatcacaattcattcttatgcctcctcacatttcccgatgtatgaccgtcagtgctattagtgtgcgttcaagtctcaggttatacatgagcgacaaccatgagatcctgactaacaattgcatcagtgacataacgtaaaatacctcttgactttatatggacaatatgacactttttttgaaaagtaaataacaatcattctcttttgtctttgtctgggtgaggtcaggtaagatggaatttgctacaaacagagtttctgtaaatgacagtcggtcagcactgtcatcaactttgctgttatctttgatcatgagcgccactctactggaatattctttatcgatgacctgactctcctgactgaggtgctaagatttggtaacttttcataatgaaaataaagcaacaggtaggtattaatgagttataaaaaactgtcccaattgacggctatattcagtttacctattactatcttattggtttcactttcatcccttcggattgttggcgaagggaattcttatgttgacgtttttctaagctttataatatttcttggttttattgagctgattcatgggattcgaaggattctggtctggtcaggctggaaaaacggaagttaaatatgatggagtttatatgcgagaaataacagaatcacagttaagatatatttccggggcgggaggtgcgccagcgacttcagctaatgctgcaggtgctgcagctattgttggagctctcgccggaatacctggtggtccacttggggttgtagttggagccgtatctgccggtttgacaacagcaattggctcgaccgtgggaagtggtagtgccagttcttctgctggtggcggtagctaattatatttttatttattttacaggtactttttcggtagtacctgtaaaatatatcctttttgtttaaaacagatagaagatccatttataagtgtgtttttatgttcaacactttactgatgaagatatgatttacagtcgttgataaataattttttaatttatgtgtaattaatagagttttattgtaataaggaagaagctgtcaggacacttacttgctcttttatgaacactcttttatgaaaattgaaacggagaatactgccagatgagtcatcagtgttcactttctgaactgaatgaaaacctggtgcctttcactgccaggcagatcaagtcctcattaatctggtgtgcagaggatgtcagaaatccagacgagctgcaaaatgcctgcagttatattatcgatcctggcagtacagcttctgccaaagtgttccatgcagagcgctatggtggcagtggtattcagcgtaatggaggtggtgcacgttgtgggtttgatggtaactaccaggttaaaggaataggaagtaatccgttggttggcgaaggtactgacgaacgtcattctaatggtgcactcggcgctgttcatgcaatatatgaggctttgtggggagaagtactggctcaaatattaccttatagtgctgtgcgggttcgggcggttttacttacagatctctatactgaaaaggcatttgagcgctccggtaggaaatcacgaagagccctgttggtacgtgagcctgttgttcgcccggcgcattttgaacgggcaccttacttccaagtaaaaccggagtattccagtctgttaattcacgatgcctgtcgggttagatctgtgatccacaagctgccaggatatctacctgtaccaccggaagaaattgatgctgaagcacgaactgatccccggatttattgcattgaggggttatgtgaactggcacgtcgtgaggcctggcaaatggcattttgtcgaacacgtttcctgagattgacaacttctccttctaatattgcaatggatggcagattaatggattttaacggactcagttgtctgtttccgggagattccccagctgattttgggtataaactaagattagctgaactggcaaaagaaccgatggtacttatgcaagggctgtctgatctctgcttgtatatcggaaaatatatgtttgaccctgacttcactcttgcagcccgtttgaaggttgaggagatatttcagaaaacttttcatgaagcatgttattactgttatctagaactgttgggtattcctggagaatttataacacaaaaagagatacctgatatattgaaagaactggttaacagttttgttgcattactcaataaatactacgagaaatcacatgcccaagatattgtcaatcaggatggttcaccattgcaaaagttggttgtgacgctaatccatcataggcataatcaaaagcaggcactgaatagtagcatcaagaatgatgtttatttcaccgttgcacaacagtgtttttcccaggccatccactggctgacgcaaggcagtaccagacgtcagataaatgcctcattactcctgaaagaaattgaacatcataccatgaaaaggctgcaacccagggaagagctgaggaaagagaatatgtgcgaaaaaattgccatcctgctggataatcatggcgatgatcccctttttttacaagaagcaatttctgatatgaaaaattttatgcttaagttttccagagatgcatttggatatcttgaaccgataagaaacacagtgtaataaatatataagggaaatagtaatcatgtcttatataagggaaaccatcagaggaaaagatgaatggactgtttatgaacagatcggttttgcggtcagttgtatgctctacaatcgtaattacagtctgtatccggtgttaaccattcaatactggactgaatatgcgatacagcataatcagattaaattcctgtttgattcacgaggttttccactggcgtatattacctgggcatatcttgaggctgatacagaagcacgcctgctcagggatccagaattcaggttgcatccgtctgaatggaatgaagatggaaggatctggattctggatttctgttgtaaaccaggctttggtcgaaaagttattgactatctcatacagcttcagccatggggagaaggagaagtacgatggttaagcaggcgaaagaaaattgtgacatacatccctgagcggctgcataaaacgtagtacctctgaagatacagagataattgtaaattacggggtaaatgcatcgctgatactattttgacaggactctgtattttctggctttgattatagcatttcggttaaccagtgaaggtattacaggaaaagtgtgagtaagaggagctattttgtttcgtcaggatgctttagaaaacagaaaaatgaagtggcagggacgggcaatattacttcccggaataccactatggttaatcatgctgggaagcatagtgtttattacggcatttctgatgttcattattgttggtacctatagccgccgtgttaatgtcagtggtgaggtcacaacctggccaagagctgtcaatatatattcaggtgtacagggatttgttgtcaggcagtttgttcatgaaggacagttgataaaaaaaggggatcctgtttatctgattgacatcagtaaaagtacacgtagtggtattgtcactgataatcatcgtcgggatatagaaaaccagctggttcgtgtggacaagattatttcccgtctggaagaaagtaaaaaaataacgctggataccctggaaaaacaacgcctgcaatacacagatgcgtttcgtcgctcatcagatattatacagcgtgcagaggaagggataaaaataatgaaaaacaacatggagaattacagaaactatcagacaaaagggctgattaataaagatcagttaactaaccaggtggcattatattatcagcaacaaaacaatcttcttagcctgagcggacagaacgaacagaatgccctgcagataaccactctggagagtcagattcagactcaggcagcagattttgataaccgtatctaccagatggaactgcaacggtacgagttacagaaagaactggttaacactgatgtggagggcgaaatcattatccgggcgttgactgacgggaaagttgactccctgagtgtcactgtcgggcaaatggtcaatcccggagacaaccttctgcaggttattcctgagaacattgaaaattattatcttattctctgggtcccgaatgatgctgttccttatatttcggctggtgacaaagtgaatattcgttatgaagcctttccggcagaaaaatttgggcagttttctgctacggttaaaactatatccaggactcctgcatcaacacaggaaatgttgacctataagggagcaccacagaatacgccgggcgcctctgttccctggtataaagtcattgcgatgcctgaaaagcagattatcagatatgacgaaaaaaacctccctctggaaaatggaatgaaagccgaaagtacactatttctggaaaaaaggcgtatttaccagtggatgctttctcctttctatgacatgaaacacagtgcaacaggaccgctcaatgactaacgggaatttcagacaaattataaatcagcttgatatgcgctggcgacgtcgtgttccggttattcatcagacggagaccgctgaatgtggactggcctgcctggcaatgatatgcggtcattttggtaagaatattgacctgatatctcttcgtcgtaagtttaatctctcggcccgtggagcaaaccttgcaggaatcaatggaatagcggagcagctggggatgatcacccgggctctttcactggagctggatgaacttggtgccctcaaaatgccgtgtattctccactgggatttcagtcacttcgtcgtgctggtcagcgtaaagcgtaaccgttatgtactgcatgatccggccagaggaagaagatatctcggtcgggaggaaatgagccggtattttacgggcattgcacttgaggtctggcccggaggtgaattccggacggaaacccagcaaacccgcataagtctccgttcactgattaacagtatttacggtattaaaagaacactggcgaaaattttctgtctgtcagctgtaattgaagcaatcaatctggtaatgccggtgggaactcagctggttatggatcatgcgattccggcgggggaccgagggctgctgacgcttatttctgctggcctgatgttctttatattgctcagggccgcggtgagtatgctgcgtgcatggtcctcactggttatgagcacgctcatcaatatacagtggcagtcgggtctgtttaaccaccttctcagactgccgctggcattttttgaacgccgtaaattaggtgatatccagtcgcgttttggctcccttgacactttgagggccacctttaccacctgtgtggttggggcaatcatggacagtattatggttgtgggtgtttttgtgatgatgctgttatatggaggatatcttacctggatagttctcggttttaccatggtttacgttcttattcgtctggtgacatacggctattaccggcaaatatcggaagaaactcttgtcaggggggcccgggccagctcctattttatggaaagcctgtatggtattgccacggtaaaaatccagggtatggtcgggatccggggaacacactggcttaacctgaaaatagatgcgatcaattcaggtattaagttaaccaggatggatttgctcttcgggggaataaatacttttgttgccgcctgtgatcaggtggcgattttatggctgggtgcaagccttgtgatcgataatcagatgacaatagggatgtttgtggcatttggttcttttcgtgggcagttttcggatcgggttgcttcgctgaccagttttcttcttcaactgagaataatgagtctgcataatgagcgcattgcagatattgcactacatgaaaaggaagaaaagaaaccggaaattgaaatcgttgctgacatgagcccggtttcactggaaaccactgatttaagctaccggtatgacagccagtcagcacaggtattcagtggtctgaatttgtctgtggctccgggagaaagtgtggctataactggtgcctccggtgccggaaaaaccacattaatgaaagtattatgtggactgtttgaaccagatagtggaaaagtactggttaatggcacggatatacgtcaacttggaataaataattatcaccgtatgatagcctgtgttatgcaggacgaccggctattttcaggatcaattcgtgaaaatatctgtgggtttgcagaagaaacagacgacgaatggatgacagaatgtgccagagcaagtcatattcatgatgtgataatgaaaatgccaatggggtatgaaacgttaataggtgaactgggggaaggtctttccggcggtcaaaaacagcgtatattcattgcccgagctttataccggaaacctggaatattatttatggatgaggctacaagttctcttgatacagaaagtgaacgtttcgttaatgctgccataaaaaaaatgaatatcacccgggtgattattgcacacagagaaactacgttgagaactgttgacaggattatttctatttaaaatccactggtgtaactttgtaaggagttttgtcgatgggggaggtcaagaaggatataaaaataacagtgattgcttttgttatcaattatctgttcttttatattccggtgtcattatatcttagttattactatggatataatttttttaatctatatatgttttttttatcacttgtagttacatttttatcgttgtggttaaacgtgaatttttacttcttcacaaatcttatagcgaaggtgttgaaatgagaaaactatctgaaaatgaaataaaacaaatatctggaggtgacgggaatgacgggcaggcagaattaattgctattggttcacttgctggtacgtttattagcccgggatttggttctattgcaggggcttatataggtgataaagtacattcatgggcaacgactgcgacggttagtccctccatgtctccctcaggtataggattatcatcccagtttggatccggcagaggtacatcaagtgcctcttcgtctgcggggagtggaagttaaaccttatattgttaatgaagcacctgttacaggtgcttcattatatgataatggtgcctatgtaacgctttaagttaggctcctccgaacgtttattattttatgcataccgcatagtaacaatgccagtccgtttaatttttatcatatgagattgtaacagaaaatgctctgttaatgagtataactgatagaagccagatattgtattcctgctatgactgcattcatcgacatgtgaagtaatatgggcattaacaggccattcgactttatttttgcactaataagaactaacgataccagaaagagcatcaaaaatgtatgaaagtcagtatattgtagatgtaatgcagaaaatatgactgatgttacaatagcagaggtgtaaatattgtcattaaaccagaatttaaaagagttaaaaagacaccctcgaaatacaatctcttcatatacaggaacaagaagtacagaagaaaatatattaatccataaaatggctccggaaaaagacatttgcgagatcatccattcttccgttttcctcactgccagcagataagggacaaataactgaataatcattattaaagagaaaagagtaaaaaaaacatccagtcgaaaagaacctcttcctaatccttctctttttcggaagaaaataaaatacagtggaacaagaattagaaattcagcaagaaataatgctggaacaagaagtcccctggatataagttcctgcctgtttgtaagaaatgcaggaataaaggtaatagaaaatgataaagtaaacattgaaaagcagccggctgatgactgtttttttatagttgcatttttattttttgtcatttccatttatattcccttacttgttgtttaaaattcttttatataacaggaagaggtaaccatagaatgaacgtttattttcctgtatcagaacagccataacttttattttatagttgttatcagtgaatgaatgcaaactaatagaataatgagaaaaacaatggagaaaaaacgatggaccggacgccatagttcatattctcgtgtatcagcctcacgtatcaacctttctgaaatggtttcggtttccttacctcgttccagaatatgtctgtaatatttcctcatgacatataccgaaaactgaaaccagattaatatggatggacacacaacacataaacttctgatgatatcacccgggaaagtatcttgggcgggtaaaagaaaatcatatactctgaataaaatcatcatcgagataaatgagacgccagcacctatccagtattcgatatgggaagatgcagcattatatgcgtcagtaaaatttttctttcttaatgaaggtggaagtgctgaatgttcaggaatgctttttcttgtccagtatattttcatatagcaactcatataaaaagtgttctactttactatgatgatgacgatttataaaaggcttataatgactacttctcctttcattctcgaatatcacgataatgatagagataatcattatcaattgattgtgtcagtaattttgacttacatcacactttcatggtttaatcaggtgatttatttaatgaaaagagtgtgtttgtggatgtattgtgtatatgtcttaccgggcatctgttcttacattaattaatatattgctatttaagtattggtggtattgtcagtaacattcttttggttaatttagttattattcctcactgattaattgtccttccgttcttattgtttgtaacttgtgtttgtatcgtacctttcaggtgttgatgcgcgctttactgtgtctgcaccggcttgacaaaatccaacagggtttgaaaaggaagatttcgtgcaaataaccgaagccttaatttcagagccgggagacatccggcgttttgttcagcaggcggtggaccactggccgcatttgctggcattttacttcacactccattcggcagaaggaaacatcaacgggcaacagattcatgcattctgtactgccttttaccgacaggtgcaagaacatattactgagcgtaatcacactgccagtccagcaccgccggtggtattacgctggttgcgggaacaacatggaggagcaacaatacgatgcctgttgctgctcagccaggcgagcatttgccatctgcgggtcagtgccacagttgatgaagaatgttcgcaagtggtggatttactgcagcaggcctggcgggggataaacgctggcggacaatgtcgggtggaaaggtgttttcgggttacccggcctgatacatcagagcaatacgttgcgttaaaaacagctgttcagtctctgatgccactggttattgcaacaattatccggtgatgatcgggagaaatatcaactcttccgttaatttttacagactgataaagttttgtctgctgaatctttatacggaattcttttcagtatgtgtacacgaattgactctatggcggataaatactgttttaccttggcggaattaatcctcacgtcttcgccagcagtggcaggatgtcctggaggagtgtcggcagactgaggcggggcagaagaacggctgcatattacattgctgaatgtggattacgtcaccagttttgaactgccttttcgtctgcttttaacccggacgccacagctgattgttacacttcgggaagcatgggatatcagccagaaaaatgtggtgttcaacgataaacggtttggctgcgtgtacagcctgaaagccagtctttctggtgtgccggatatattccggtatcatctgtctcatcgtattcgccggatggttgggagtgaaaatacatcatcgccatggcagcaaattgcccgggaagtgaaagcgccccgtgaacgactgaagtatgcgctggaaacgggattgcaggtgatcgcactgaacggcctgttttggtcagacagtcagcgtctggtggtggatattctgaggctaagcgccaacagacgtgatacaggaaatcgtccgcatccccatttaccgtcttatatcactggcgctgacactgaaagcatggtcgtcagagactctgtctggcaaccaagggagcagaggccggaggtaattgacaggagccttgcgccgggttacgtatgttctccccggacagacagtctcagttcgtagaatctataaattactgctactgatgctgccggggaaaggcgtaacgaaaaaacagcctccgttaccggatagcaaggaggctgaatggagtttacaggatttgcttttgtataatgtctggccatgcagtaaaaccggacaggttttattatcatgtgaggtattctgacataaaatgctggatttttattttgtgacgaatgctgcaaaattgaatctgcactctgatgtaacttttatctgtttcagtgaagcatgcccacaaactgagttattaagttgtggaagaacagctctgtcccgcctgcatctctcctttcagaaaccagtatgttgccatgcctcgtcttaacggagagcgctgaaccataccttctttttccagtaataacaggtaatagcgtgcctggtaatccgttaccgccagcgcctccgcaatttctgcggttttccctccattatgtctgctcagaaaacccattatttcattctgcatatcatcatcctctctatataagcaaaaggataataagtggctgacttgtttttgacaattcaaatgtgatcatcatgtttttatattgtatttggtgtatttacttaatatgcgaaacatattcacgattggatttctatcacattatttttatagttttttcaatggtaaggaacgttgcaaaaaacgattttaacgatcttttatactgaatattcattcttatacagcattaatcactaaggcaccaatccactgcaagatataaccctaaaaataaacagctttacagatcaaaagatcgtcaaaatacatgtttacaacataaaaaactaaatatatcttaaggagccaggccctcctgtatgggggatgaatattaaggcagccctgtaggtggcggggtggggagtatcgaatggcacagcatgaagttattacccggggaggggatgcttttttactaaaattacgtgagagcgcgctgtcatccggctccatgtctgaagaacaattttttttactgataggtatttcctctattcacagtgacagagttattctcgctatgaaggattatctggtcagtggtcattcccgtaaagatgtctgcgagaaataccagatgaataatggatatttcagtacaacgcttgggcgccttaccaggttgaatgtcctcgttgccagacttgctccttattatactgatagtgtatcagctatagctgaagctgcttccctgtaaaatacggacaataaaaaacgccggggcaatacataatacgcgagaaatataagcctgcagtcaaatgagagtgcgggtattatcaacgaggcatgctttcattctctgcttttgctaaagcattcagtgtggagacaggagtgctaactcatagcttatcatccagggaatcttatctatagagaagattcctgtcggttaaccggaaaatattatcgggagataatgtcataaatgctgcctgagtgtatttctcacattgcatttatgaagttctcctgaaaaaagattcccgtcgttcgggatattgattgtgtctgttgtgatgacagatacggtgtgcgtagttcaattaaaaacaggaattaaatatgaagttaaaattcatctccatggctgtattttcagctctgaccctgggtgttgcgacaaatgcgtctgctgtcaccacggttaatggtggtacagttcattttaagggtgaagtggttaatgctgcatgtgctgtaaacactaactcattcgatcagacggttaatcttggacaggttcgttccgaaagattgaaagtagatggagctaaaagcaatccagttggatttacaattgaattaaatgattgtgactcgcaggtgtctgctggtgcaggaattgtcttttcaggcccagcagttactggtaaaacagatgttcttgctttacaaagttctgcagcgggttctgcaacaaacgtcggcgttcagattactgaccataccggcaaggttgtacctttagatggaactgcaagctcaacgtttacattaactgacggaaccaacaaaattccatttcaggcggtttactacgcaactggacaggccactgctggtattgccaacgccgacgccacctttaaagttcagtaccagtaatatcagaacagtgtaacggatatatacccggccagggagggctgtttttatccatgcgggtgtgagattaatgaaaatatcgaaaatggcaataatgttatttttgctgtctcccgctgcactggccggaaaccactggcatgtcatgcttccgggaggaaacatgcgcttccagggaaaaataattgctgaagcatgcagtcttgccctgtcagacaggcagatgactgtggatatggggcaacttagcagcaatcgatttcacgccgccggtgagtatggggactctgtgggctttgatattcaccttcagggctgcagcactgtcgtcagtcagcgggtggggatttccttttatggcgtgtcagatattcacgagccggagttgctgtcggtggatgaggagaatgatgcctcagacggaatcgctatcgctttatttaatgaaagcggagagctggtaaaacttaatcagcctccggagaactgggtgcatcttacccgcggagatatgaaactgcatatgcaggcgaggtataaggccacacattatcccgtcaccgggggaaaggcaaatggacaggtatggttttctctgacctatctgtaactggcagatataacgccatttaattaaggctgttaataacatgatgaagcacatgcgtatatgggccgttctggcatcatttttagtctttttttatattccgcagagctatgccggggttgctctgggggccacccgtgtgatttaccctgaagggcaaaaacaggtacaactggcggtaacaaataatgatgataaaagtagttaccttattcagtcatggattgaaaatgctgagggaaaaaaggatgcccggtttgtaattactcctccgttattttccatgcagggaaagaaagagaataccctgagaattattgatgccacaaacggacagatgccggaagacagggaaagtttgttctgggtgaatgtcaaggccatcccggccatggataaggcgaaaaccggcgagaattatctgcagtttgcaattgtcagcagaattaaactgctctaccgtccacagggactggttattccgccagaacaggcaccgggtaaattagagttcacccgtgaaaacggagggctgactctgtttaatccgacgccgtattatctgacagtgactgacttaaaggccggaaataaaagtcttgaaaacaccatggtacccccacagggaaaggtcactgtgaatatccctggaggatacaccggaggagatattacttataaaacaattaacgattatggtgctctgactgaacaggtgaagggtgttgtgaagtaactcagttatttctggtactggttgtgtttggctgctgattttattttttcgctcagtgtgggggctgacatgtttttcggagatggcggacagctcctgtctgataaatcactgaccggctctgctggcgggggtaataacagaatgaaatttaatatactgccgctggcattttttatcgggataattgtttctccggcccgggctgagctctattttaatccgcgttttctgtctgatgacccggatgcggttgcggacctgtctgcatttacacaggggcaggagcttccgccaggcgtgtaccgggtggatatttatctgaatgatacgtatatctcaacccgtgacgtgcagtttcagatgagtcaggacgggaagcaacttgccccctgcctgagtccggagcatatgagtgcgatgggggtaaaccgttatgccgtgccgggtatggagagactgccggctgacacctgcacatcactgaattccatgattcagggtgccacattccggtttgatgtcgggcagcagcgattgtacctgaccgttcctcagttatatatgagtaatcaggcccgtggttatattgcgccggaatactgggataacggaattacagcggcattgctgaattatgacttcagtggtaatcgggtgcgcgacagctatggtggcaccagcgattatgcctatctgaatctgaaaacaggactgaatatcgggagctggcgtcttcgggacaacaccagctggagttacagtgccggaaaggggtacagccagaataactggcagcacattaacacctggctggagcgggatatagtttccctgcgctcccgtctgacgatgggggacagttatacccggggggatatttttgacggtgtaaatttcagggggattcaactggcctctgatgacaatatggttccggacagccagagagggtatgcaccgacaattcacggtatttcccggggaacatcccggattagtatccgccagaacgggtatgaaatttaccagagtacgctacctccaggcccgttcgagataaacgatatttatccggccgggagtggaggtgacttacaggtaaccctgcaggaagctgatggcagtgtacagcgatttaatgtgccatggtcttcggtgcctgtactgcaacgtgaagggcatctgaaatatgctctcagtgccggagagtttcgcagtggcggacatcagcaggataatccccgttttgctgaaggaacgctgaagtatggtctgccggcaggctggacggtgtatggaggagcctggatagctgaacgctaccgtgccttcaatctgggggtgggtaaaaacatgggctggctgggcgctgtttcactggatgccacccgtgcgaatgcccggttaccggatgaaagccggcatgacggtcagtcatatcgttttctgtataacaagtcactgacggaaacagggacaaatatccagttaatcggataccgctactccacacggggctatttcagctttgctgataccgcctggaagaaaatgagtggttacagtgttcttacccaggacggagtgatacagatacagccgaagtatacggattactacaatctggcttacaacaagcggggaagggtgcaggtgagtatcagccagcagacgggggaatcgtcaacgttgtatctgagtggcagccaccagagttactggggaacggacaggacggaccgtcagcttaatgctggctttaactcatctgtgaatgacatcagctggtccctgaactacagcctgtcccggaatgcatggcaacatgaaactgaccggatactgtcatttgatgtcagcattccgttcagccactggatgcgttcggacagcacatctgcatggagaaacgccagtgcccgttacagtcagaccctggaggctcacggacaggctgccagtacagcagggctgtatggcacattgctgggggacaataatctgggatacagcatccagagtggttatacccggggagggtatgaggggagcagtaaaacaggatatgcctctctgaattacagagggggatacggtaatgccagtgcaggatacagtcacagtgggggctaccggcaactgtattatgggctgagtggcggtattctggcacatgccaatggtctgacactgagccagcctctgggagatacgctgattcttgtccgtgcaccaggtgcatctgatacgcgcattgaaaaccagacgggggtgtctacagactggagggggtatgctgtactgccttatgcaacagactatcgtgaaaaccgggtggcactggataccaacacccttgcagataatgttgatatagagaataccgtggtcagcgtcgtgcccacgcatggtgccgttgtgcgggctgactataaaacccgtgtgggtgtgaaagtgctgatgacgctgatgagaaacgggaaagcagttccttttggctctgtcgttacggccagaaacggggggagcagtatcgccggagagaatggtcaggtttatctgagcggaatgcctctgtcaggacaggttagtgtgaaatgggggagtcagaccacggaccagtgtactgcagattataaattaccgaaggaaagcgccggacagatattaagtcatgtcacggctagttgcaggtaaagaggcagggaaatggtgaaggatattattaaaacagtgacattctcctgcatgctggccggcagtatgttcgttacctgtcatgtctgtgcagcgggttctgtggtgaatattacaggcaatgttcaggataacacctgcgatgttgacattaactcccgaaaccttgatgtcagtctgggaagttatgacagccgacagtttaccgcagctggtgataccacacctgcgtcggtatttcatgtcgggttaacctcctgcggcagtgctgtcagtgcagtgaagctgacatttacgggcacaccagataatcaggaggcggggcttattcagattaacagcataaatggagcgcggggtgtggggattcagcttcttgataaggataaacatgagctgaaaattaatgtgccgacaacaattgcgttaatgccgggaacacagaccatagcgttttatgcccgtctgaaagccacttatcttccggtaaaggccggtaatgttgatgcggtgattaattttgtacttgactatcagtaaatataacacagaggaaaacagatgaaactgaaagctattatattggccaccggtcttattaactgtattgcattttcagcacaggcagtggatacgacgattactgttacagggagggtattgccacgtacctgtaccattggtaatggaggaaacccaaacgccaccgttgttttggataacgcttacacttctgacctgatagcagccaacagcacctctcagtggaaaaatttttcgttgacattgacgaattgtcagaatgtaaacaatgttactgccacctttggtggaaccgcagaaaatacaaattattacagaaatacaggggatgctactaatatcatggttgagctacaggaacaaggtaatggtaatacccccttgaaagttggttcaacaaaagttgttacagtgagcaatgggcaggcgacattcaatcttaaagtccgtgccgtaagcaaaggtaatgctggtgcgggaagtattaattcacaaattactgtcacctatacctatgcgtaaatattatcccctctttaagaaaagcaccgtcctcgagggctgtgttttattcacatttataatggcatattcccagccatcgtttgcactgttgtgcagaaataaccagacagggcagacttttcagtctggagacagtcgcttcaatatcactctttccccaacagttcagtatgataaagccattacagttctggatttaaatcaactggtgttatgtcagaatgaagatgcctctggtcagaactatgactatctcagggtcagacagggaaccggtttttctccttcattagatgctaaaacatacggaaggctggactttacaaacaggctttctgggtatagtcagacgttaccgctgcagcaagacacaaagccaacagaagcttactggcaatatggtgtatggaaacctttcccggcaaaaatgtacctttatcctgagccgggcgttttcgggaaactgatacatgccggagaattagtggccacagtttatgttaataagttttccaccatggggcaggaggcaggggagagaaatttcacctggcgtttctatgcaacgaatgatgtctatatccagacaggtacatgcagggtctcatcgaacaatgtcaaagttgaccttccgtcctatcccggagggccggtaacagtccctcttactgtacgttgcgaccagacacagtcggtcagctataccctgtcaggttctgtaacaggaagtggtaatactgtattcgcaaatacggcaacatcaggggccggcggtgtgggtgtacagttgtcggacaacgcggggctggttccggccggacaaccgaggtctctgggacaggtaggcagctctcctgtgagtctggggctgaaggcctcttatgctctgaccggtcaggcaagtccgacgcccggtgctgtccagtcagtgataaatgtgacttttagctacaactagaatgcagttgtggcggtaatgatattactgctctttatatccagtttttcatttaatgtatcactgtttgtggagaaaaatagctgataatagtattgtttccggtgttgtgacggaacgagtctgtcatatggtctttgtcaaagataaacagaaccagtatgagccgtatatctggttctgagcgttgtcagtaatcataaagataatggtaaatctgagggtttaaaaatcaaatcagaagaactgcgcttatccagccagaccttctggtcgggaggggctcatatttccggaggagtaatgtcaggggcagttaacagtatactggaggtgaaatcaggcagaacagaatatatcctctcaccggtttttgagcctgtatggaatcagaccgggaaaatatttgcttttgaaatgctctcggatatccgttcagcaaaagacgggaggaaaatctgcgcatctgtttttttcagaagtgcacctccggatattcagtacaaaatactcatcagtcagttgaagactgcggaaacgcttcataaatggtgtctgcagaagaaaataatgctgagtgtcaatatttcccgggtggtagccctgtatctgagaaaacatggcatcccggggcggccgggaacacatatcaggcttgaggtcagtgaggactttccggcagtggcgttaaaacccggtgatgaccccctgttacgttttttgtcagaacgtttcaccctctggctggatgatttcggctcaggaaatgcaggcttaatgtggggactgtccgggatgtttgaacgggtaaaaataagtcatgagttttttcattatgccctgaaaaacaggtgtgcaatgtcgcttctccatgctgtggcagactctgttgcctgtcataaccggggcgtgatacttgaaggtgttgaaaatgaagcgttgttccgtattgccagagacatgaatgtccagggctgtcagggatggctctacaggcgtgtggaagctgatgaattatccgcgattactgagctgcatggataatcctttttcacagacttgtcagcagccagcatttatgttcttttatctgagggaatttatctgtccgctgtgccgggatatctcagttatacagaaatcaggcaggaataaattgtagtggaaagtcgatgtttaccggatgactgatgcgcgcttgtacacagacagtgtgtttcagtaatatggagaataatgaaatgaataacacagacacattagaaaaaataatcagacaccaaaaaaacaaagaccccgcatatccctttcaggaacatttgttgatgcaactctgtattcgcgcaaataaaaggatgcaggataatatatctgaatttctgggggcgtatggaataaatcactcagtgtacatggttctcaccacattattcacagcggagagtcattgtctgtcaccttcagagataagccagaaactgcagtttaccagaactaatattacccgcattacagattttttagaaaaaaccggatatgtaaaaaggacggatagcagggaggatcgccgtgctaaaaaaatcagtctgacatctgaaggtatgttttttattcagaggctcactcttgcacaaagcatgtatctgaaagaaatctggggttatctgacccatgatgaacaggaactgtttgaagtcattaataaaaaattactggcgcatcttgatgatgtcagctcataaagtgtgaaatgcctgacttgttgaaagcagtagtgttgcagaaagacctggtgatgctgatcttatatacataagcagcgcccgtgtctgaaatgcaggttagaaacaatgtgaacactatccgttagaaattgtgacaaaattcccgatgatcgacaagcgcaccgattttccagtggcaacatcagtacaaaagatgaacggtactgactttgccggaatgagtcaaaaagaaagctgaactggcactactggcagtgcttcagaaatttatttgactgaagtacaatgaaataaaaaacatatgttatatactcaataaacctcaagatgcgggtgtgagcacctgaaagtgatcgttaattcgggatgtcagtgagtccgctatatccggcagtgtctggttaaaaaagacagatattgcttccctgaactctcgcgtactgctgaagtagcgattattccgggcatgttcgttcattaatttccacattctttctatcggattcaggtttggactgtaagggggaaggtaatgcagcctgatatttaccacttccgcccagtctttcactaactgtgaacggtggtaacctgctccatccagaataacgtggattttttggttataatcaggataaacctttcgtatctcattgaaaaaacgggatacattatattcattaatggttttatattcgcagattagcggtgacgtcagtgctttcagattcagcgcccccatgatattcaggcgtgtgcggctgcctgttgtttttactgcttttttctggcctttgcgtatccagccatagctgattttagtggcctgagtcggatggactccatcaataaaaagaatcggctcatcacccacagttgttttcagttccttatagtattcaatgaattgcctttgtttctcttcactgaatttatgggggacgcctgacggttttttgtaggtgacaccattacgatgcagccacttattcatccccggaatgctgaaaatgatgttccatgtccgggtgacaaacgcaataacatcgcgggtatggtgaaataaattatcggataactggctgattaaaaaggccgtttgttcagcactgagtttgctgtctgagccgccgttttcgggcttcagttttcctttattcaggaattcgctgatatggtgatcaatcgttgtctgatgcaggcgtaaagcctgagcaatcatggcagaactccagccttcggaagccagaagaatggctttaatacgatctctgactcgcccgtcacgactggaatcatgaaggcgttcaagttcagctttttgttgctcagtaatgaatattttcatgttggacagcatgatcttctgttgctgaaaaatcaagcatcttcaatgatcacgggtatatatcaatttgatatttatgaaaaatcaatagatttatcttgtgagggattgctttttcttttgctaaatgatattaattatcattcttatataaaaacaataatggcagtaagaaatatctggcaaggatgtgagcttaacgatcaaacattttaagttaggcatttattagggaataggaatgagaattaacaaaatcctctggtcgctaactgtgctcctagttgggttgaatagccaggtatcagtagccaaatactccgacgatgataatgacgagactctggtggtggaagccaccgctgagcaggtattaaaacagcagccgggcgtgtcggttattaccagcgaggatattaaaaagacccctccggtaaacgacctttcagatattattcgtaaaatgcctggtgttaatcttaccggcaatagcgcctcgggcacacgcggtaataaccgccagatcgatattcgtggtatggggccggaaaacaccttaattttaattgatggtgtaccggtgacgtcacgtaactccgtgcgttatagctggcgtggggagcgtgatacccgcggtgacaccaactgggtgccaccggaacaggttgagcgtattgaagtgatccgcggccctgcggcggcgcgctacggttcgggggccgccgggggggtggtgaacatcattaccaaacgtcccaccaacgactggcacggttcgctgtcgttatacaccaaccagccggaaagtagcgaagagggcgctacgcgtcgcgccaatttcagccttagtgggcctctggctggtgatgctcttaccacgcgtttgtatggtaacctgaataaaacggatgctgacagttgggatattaattctccggtcggtacgaaaaacgcagccgggcatgaaggggtacgtaacaaagatattaacggcgttgtctcgtggaaattaaatccgcagcagattctcgatttcgaagtcggatatagccgccaggggaatatctatgcgggcgatacgcagaacagttcttccagtgcagttaccgaaagcctggcaaaatccggcaaagagacgaaccgcctgtaccgacagaattatggcattacgcataatggtatctgggactggggacaaagtcgctttggtgtttattacgagaaaaccaataatacccgcatgaatgaaggattatccggcggtggtgaaggacgtattttagcgggtgaaaagtttacgaccaatcgcctgagttcctggcgaaccagcggtgagcttaatattcctttgaatgtgatggttgatcaaacgctgaccgttggtgcagagtggaaccgcgataagctcgatgatccttcctctaccagcctgacggtgaatgacagagatatcagcggtatttctggctctgctgcggatcgcagcagtaaaaatcattctcaaatcagtgcgctgtatattgaagataacattgagccggttcctggcacgaatatcattcccggcctgcgctttgattatctcagcgactccggcgggaacttcagccccagtctgaatctttcgcaggaattgggcgattatttcaaagtcaaagcaggggttgcccgaacctttaaagccccaaacctgtatcaatccagtgaaggctatctgctctactcgaaaggcaatggctgtccaaaagatattacatcaggcgggtgctacctgatcggtaataaagatctcgatccggaaatcagcgtcaataaagaaattggactggagttcacctgggaagattaccacgcaagtgtgacctacttccgcaatgattaccagaataagatcgtggccggggataacgttatcgggcaaaccgcttcaggcgcatatatcctcaagtggcagaatggcgggaaagctctggtggacggtatcgaagccagtatgtctttcccactggtgaaagagcgtctgaactggaataccaatgccacatggatgatcacttcggagcaaaaagacaccggtaatcctctgtcggtcatcccgaaatatactatcaataactcgcttaactggaccatcacccaggcgttttctgccagcttcaactggacgttatatggcagacaaaaaccgcgtactcatgcggaaacccgcagtgaagatactggcggtctgtcaggtaaagagctgggcgcttattcactggtggggacgaacttcaattacgatattaataaaaatctgcgtcttaatgtcggcgtcagtaatatcctcaataaacagatcttccgatcttctgaaggggcgaatacctataacgagccaggccgggcttattatgccggagttaccgcatcattctgatcgtagtgtttcaggcgcactgcccgcgtaaaagcgggcagtgtttagtggcttaactcatgacaacctgctgtgtaatttgcgttttcaccactgatatctaacagtgcctggcgaaaggaggcattgaacatcggcccgtgtcccaggttggggaaatcccaaaatacggcattgacgcctttatctttcagtatagtgagggtggtatgaattttcgacagcaccccgacagcatgcgtttcccggttatcaccctgtgtcgccgagccttccattatcgccaggtgtttggtgcagaattgcagaggctcaaccgccgtaacgcggcttagcaaagcatcataacctctgcccaacgacgggctggcgctgtagtacgaccggaagtaagaggaggacagccaggaatccagcacgaagaggccgccgtaggagtgcccccataagccgcggcgttgccgatcgatattcagtccctgttccacttttggggcaatacgcgtttccagtaactggcggaagttgttgctgccaccactcttacggctaaaacgccctgagtggagatctgtttttctgctttctgctgctggcgtatagtcgtaagccctgctgttgagatcgaaagggaggttggtctgatacccgacagccacgatcactggcggtgttttttctgacaattgtttgagcagttcgtcatccaggcggtccataactgcgttaccgtcaagcatatataaaatcgggtaacccgatgccggtgcggttgtattcggcacggccgtccatacccgataatggcgtgtgccatcgacagagtcgaaagaggtggcgctgaaatggtaaaacacggagcctttatcggctatattcggccccagtggccgcatatccggcttcgcataaacttgcgcactacagataagggtgaggcaagaaagatgaaagaaaatcgctttatgcgggcgtgttgagcgatactcgcgggcatacatctgatgattattccttttccgcaggtgacaatttgatttattcaggaagtctgtaccgtttcctgaaagtgtttgtgggtcaactcaaccctgtagtaaaccaatcccgtcaatcagtgcaccgcgccaccatgcgtaatcgtgaccaccggtgtagattgcgcaatggctttcgacgccagcggtaatcagccgctggtgaagttgctgaacgtgaggaactgtcgaaccttccagcgatcccacgcacaggctgatacgcacgccctgcggtggggcagaaagcagatgctcactcacccatgaggtatcggtttcgctgaacaagcctggtcgactggttctttctggcgtccaccacattgaaggagagtggctgagcaccagaccgaacgtttccggtgcgtaacgagcccccattagcgcactgatcccgccgaggctctgcccggccagcactgtgcgcgaacggtctgcccactgacgctgcggttgttcagcgcggatcatcggcagcagatgccctgcgatatcctttatcagcttgctgcgcccgccgagtatctcagtgcgttcatgttcattaatgttgtcaatgcccagtacagccacgggcacgatgcgcctgttatttatggcggcgtcaattgccgcgcatacgccaaggtgatcaaaccaggtttcaccatcgggcagcacgaccagcccgaggggctgagaaatatcaatgtccggaatatagagccgaacctggcgagatttcccggcgataatgcgcatggaggtaagcagttgtccggtgtggaagccgccgttccattccgacagggcgggagctttatcaagtgtcagcactgattcctttgcgtttccccgaacgttgatctccggcattttgtttagcggatcggcctttccggcgagggtggcaaaacggcctccggacagtgcaatcgtctcagccgtagtgccgggggggatttccagcagcgaataggagccgcagtaacttgcgggtaaacgcagtgtcagtgtccagatatccgtttcgggaagggcgctcatcattcctttttctacgtgctctttatccgtcacccggttcagacgcagataaacgccctgcaggggatgtcgggcgcgccacagaaaggtcacttctcgctcatcttccgctccttcgactggcgtcacaagaggaacattcagcgactcagcttcgcgccagaagtcagtaaggttagcaatgtggcccgctgccagttggttgcgcaggctggcgatagcagagggatgttgttgcatgttcagcattcatactctttaaaaattaaggatgtcagtataaataattaaagcggctattcacggtaccgccgcttctgactgtgtttttaatacattacgtgtccagtaactatcccggggtttcctccttcatgttgtgctggcgatggagcgcagtactgctgacgctgtcatgccataagcgggtatagaggccgcctgcagataacagctgttcgtgggttccgtattccgcaagtaaccccttatcaataacggcaatcagatcgcagcgttgcgcggtggtcagacgatgtgcaacaatcagcgccgagtgcttcccggcatgcacgacatctgttaacgatgacatcagtcgttcttcggatgtgcgatccagacatgacgtggcttcgtcgagcagcaggatgtgagcattcgccagttgcgcgcgggccagcgcaatcaactggcgctgacctgcggacagatcggctccgccgttattcaccggtgtccggaatccctgcggcagattgcacaccatctcatacagccctgcccgctgtgaggcaatttcaacgtcttcattggtggcggatggccgtgaataacgaatgttttctgcaatatcactactaaacagtgctacatcctgatcgacaagcccaatctggcgacgatactcagtgagcgaggcatcatcgagcatttgcacaccgattctgatgttgccgtgcgtggggaaatacaacccggcaatcagcttaatcagcgtcgacttacccgcaccgctgcgaccgacgaccgcgacaaccattccctcagggatcgtcagggtaagtttgttcagagctggctcgtgactgtcgggataactgaacgtgacctcatcaagatgcagtgcaccggtgacagggaggaccgaagaggacccgaggttctcagtgccttctgtcgccagtagttcatcaatatgtttgccgctggctgtcgcctgctgccaggcgtcgacaatccctgataactgctgcactggcccatagaattgccccagcaacaggaagaaagccgccagtaccccggcagtcatttctccagcggcgacctgcgaagctcccactaacagaacggcggcataggaggcctcggtgcagaatgtcaggaacggaaaatagactgcaaggtatttttgtgctcgcacacgggttgcgcggaaacgctccgataacgcgcgcagccgggcgccctccagttcctgctgaccatgcgattgcacgacacgcaggccggagactttttcctgcagggtgctgttgactttgcctatttccagccgtgcttgtgcataagcaggggtactgaggcggcgataaatcatggttgccagtgcggccactggcactgcgcttaatgccgtcagcgccaggatcgggtcgagccagaacatggtggcggcgattgcgaacatcgtcaccagactggtggccgcaccggcaaggccgttttgcagaaagcgggcgagagagtccacatcaacggtcatgcgggtcagacgcgaatcggcatgcttttcgtgccaggggagtccaagacgcagcatatggccgaagctacgcaagcgcaccgaatgctgaactgattccgccgctctggcggcgaagaccgtctgcagagaataactgcaccagcccacaatgactaggcacagggcgagcagggcacagaggccgatggtcgacatatcgcctgcggcgacaccggagtcaatgccgtgctgcaacagtatcagcacccctacgcctgctgcagaatcgagtgcgatcagcagagcggcgatgacgaacatccatgccacaggcttcagtagtgacgtgactttgcgacctttaccggccagcgcctgctgtactgcattttccggtacgcgggtcatacgggcgacaaaacctttatcccccgtatccgttacatcgtcttgtgtcgctggttcagccggccacaattcgttgtggctattgtgggacgtggccagaaaatcgctgtcgccggtcatcagtgcgcggaacgccggacagcgcgcttcaagttctgccggggttccggtatccaccatacggcccttatccagcaccacaacccggctggctagctgaagcgttgaacgccgtcgggcaatcaccagcagcatatgcccttcgtcagcatagcgacccagcgcggtattaatctccgcttccgtaacagcatcaaccgctgaggtggtatcatccaggattaacacgtccggtgcagtaatgagcgcccgcgccagcgctattcgctgcctctgcccgccggaaagattcgtaccccgttcggttaacaggctatcgaagcctttcggcagggcgttgataaaatcgctggctcctgcagcagctgccgcacggcgaatgtcgtccgccgttgcctgagggtggccataggcgatattttccgccaccgtaccggcaaacagaaaagcatcttcaaatacgatgcctacccggcgacgaagcgcctccagtctgatatcgcgaagattttgtcggccttcgctggtgttgagccatatctttccggagcagggatcataaaaacgcgccagcagcatcaacagggtcgattttcctgaacccgatgcgcccaccaccgccacggtttccccagcgcgcagggaaaaggagatatcgctgaggatatgtctgtcgccatggtggtagtcaaagctcatattctccagttccagtccgacaacctgactgttaatcgactccgtcccgtcctccatctgtgaacgggtgtcgatcagtgcaaacacccgctccacggacgcctgagtgcgctgtgcgataaccagaaacgatgccagtacgcgggttggcccggtcagcatcgcgaggaagctggcgaatgcaacgaaggtaccgagatcgatccgcccgtgcatgaccgaccacccgccgtagcacagcaggacgatttgcccgagcaccggtagcgccagcatagtggccccaggcatcgcctgcgagataaccgcaccgatgcgtacacgcacaatctgccgcgactgcctatcgagccagtgcgtttcacgcatctctgccacacaggattttaccactgagatctgtgccagcacctcgcgtatatgttcggtgagattcgccagttggtccgaggccattccggtttgcgcgaagaccctacgacgcgcacgaagcgcggtgatcgccaagcataccagtacgcacacgacgataagcgtcatggcaggggacatccacagcatcacggcaatgccggcaatgtaataagtgaacactgccagcggcaccgggcacatctgcagcagggtatgcacctgctgcagatcgctgttggtccgtgaaatcacctgcccggtgcgcagcgcatcctggcctgcgccgtcaagtttttgaatactgtcgaatacccgtcctctgagggtatgctgcacccagagtgagagcatcccggcataaccacggcgcacatagttaccgatgaaatcaaaaaaagcgatcaacagtaacccgcaggccagccacggcaggcgggccggattgcccgccagtgcgtcattcacagcctgtcttgtcagcagtggcgtcagcgcagccagcaaaatagtcgatactgacgctaccaccacgatgacactaagtttcttacgttcccagcacacgcgcgccaggcgaactatccatgactgagccggtgtgggagtgtgattcgcaggcattaagcctcctccgtctgtaaaatacgatccactggccggatcgttccgcaaaaaagccagcacactccggtcccgcattgttatggatgcatgactcctggatgggggctggcaaatgattatcatgaaggtgtagtggctaccctttctgtaccattgtgatcaggcttttcgccacttcaccagggcagggttgcgccgccatttccgctgctacctcttcagaggctttgcgaagtgagcgattgttgaggaaagcattgatcatgttactcgacaggccgacgtcgccggggataatcccgcagccgcgttcggcaacaacgcgggcatttaccgggcgatcggctccctggccgaagactatttgtggaataccagcgtgtagcgctgtcagggtattgcctgctccgccatgatgaatgaaaccatctgcgccgttgaggaagacacccatgggtatccagtcaaccaggcgaacatttgatggcagcgagcgcaaatcggaccgcgcattggctgaaatatgcaggatgatctcggcatcgacctcactggcagaatccataacccaggcgattagatcaaggccgtcaaccatcggtttgacagtgccgagactcaccagaagacgtttacgatcgggccttctctcccaccatggttcccacaccgcaccaccgttatatgggacgtactgcatcggaataatgggttcaccgtcgttttccagaatgctcatactcggcggtgttacgtcgatccaggccatatcgcgtggtgtggccccgacattgtggcgacgataggcgtccgtgagcgaacgcgttacacccctgatatgccagggggtatggccgaagcctacggtttgcatcacgaccggtatatcatatttggcggcaatcagcggcccgatgactccgagtggagggtagatgatgaggtcaggccgccagtgtccggcaaactccaccagatggtctgccatttcttcgctgaagaatgagaagttgcccatttgggttccgatgttactttttttccgctgtgcctcatggtggcggtaaccagcttcggaatccagaccgggggcagcgtcaaacaccaccaacccggcctctgccgctttttgtgcgaattgtcctccgctggcgatcagtacttcatgaccgttaacgcgaaatgcctgcgccagggacagcacaggatacaacagcccatagagaggcgggcctacaaacaaaatacgcatgagaaaatccctctccgcttgacgatctaaatcaggcagtcgacgcactcatatgccagcagcaggacacgacttttcgttaaacctgctttaccagatgctgcgccatttgtgcttcaccagcgttatggacagatcagtcagagacttttccgtgacatacacaggtgaacagggaactccgtatccccacttccattaacgcttacgcgccattgtcctgttgaacatcccggcgtcagacagctacgccgggatgttcttacgcatttgtgcagtgttagaccgacaatgaatctggaaagatccgtgactttttagacacacggcttgcatcatcctgatagtctcgccttcgctggcctgtaagtaaaatgaccttgtactggcgatgcgtgttccctttcagccttaccagagacaacgttagcgcaaatgctaatgataataattaccaatatcattaaggtattgcaacgataattaaaaacttaatgaaaagggaagcactcagaggactatccgggggtatttaaattgaaacctacgctgctccagaccgtggagaatatttgcctgcaaattctgttcgtgctgttcctgttcaccggaacgctgatagacgttgaggcattggtgagctgttcttccgttgccaaaaatgtacagagaactccggccagcagcgtttcatcctctgtctatagcgcaagcgtgtcgagaactgctgctgatattatgctgttgtcgaataatccgctttttgctccgggtcaggtgagttttttcggctgttcgttggcagcgtcaggtattcacgtcaccattctggagtaatgccagtcaattaagcaactgactggctctttttgtgcacagaaaacccccagctaggctgggggttccggaaagctttcagctttgagccagttattaaaaccccttttgatttgttaaaacaccttgcggtctggcaactgcaagtgtcaaacaagaaatcaaaagggggtcccaatggggaacgaaaagagcttagcgcacacccgatggaactgtaaatatcacatagtatttgcgccaaaataccgaagacaggtgttctacagagagaagcgtagagcaataggctgtattttgagaaagctgtgtgagtggaaaagtgtacggattctggaagctgaatgctgtgcagatcatatccatatgcttgtggagatcccgcccaaaatgagcgtatcaggctttatgggatatctgaaagggaaaagcagtctgatgccttacgagcagtttggtgatttgaaattcaaatacaggaacagggagttctggtgcagagggtattacgtcgatacggtgggtaagaacacggcgaagatacaggattacataaagcaccagcttgaagaggataaaatgggagagcagttatcgattccctatccgggcagcccgtttacgggccgtaagtaacgaagttggatgcaaatgtcagatcgtgtgcgcctgttagggcgcggctggtaagagagccttataggcgcatttgaaaaacctccggctatgccggaggatatttattcggggctgtggggtatttctagggcctctcctttaccactctcgggaaggccgtttcccttcttgtcggtaatttcacaagttgtcccatacttgcaagatcgcgcatcagctccggtatacgtcccggtgaagcgccctgcaatgtcatcagcattctcatcaccattccgcatgattctgagaaactcagttgattcggccagtaacctttcagatgttccgccattttaatcatctgatatctcaccagattataagccagtaagacaccccacagctcttgctccacaagctccggctttttacttctcagcgtcagcctgctcagttgcatcgtctgttttatctctctgtatccctggtcaggttgacggggcactagtggtttcagcggttaatcgtcgaacaggcgcgagacaatattcgcattcaacaaaataacaaacgcaacactgatcgttttgttgagaggataactctttttcagggttatgggtgaaaggcctgaaaatttgcgattatctttaagagagtcacaaatacactccaaaaccaaaacccgctctctcattctttagactgaacttagcgtagctcaccatgtcaaaatgtttgaaactgctctggtgtgggaagtgttcgaaaactcgtagattgttatttcaatcagtgcgcaaaagagtgtcttactgaaaaatgaatatagatattcatctggcgattcgagacgaaaagatttctttcatccgcagttatgcgcatggttaagaggtgacgattgaagaagtcctgatcttactgaagttacgcggatagtgggtaatgccgcgagattgatggaactttaaaaattatctcttaacgttttacggatataaaaagtttattttttgttaagagagattacttcaccagacaacttgaactcgctgcagggcgttttttatgcccgaaaagctgcacagtacgttaaatatgctggtgattgtgcagtgagtttctccaagcctgatgtgacttgactgaatgatatcacatttgtaatgtaaaataaatcaatgtttttaagttgctaggtgcttgtttctatagctggggcacttccttttactatggctttccatggtggggggcggagctggtgttgatgatgtggccagaagcctgttttatgctgttacagtcatcgttatattccttattggatggggagcaggtattgttttctttctgggaattaaacaaaaaacaatatgaaggatttgagttttatcagattttttctggcaatattgttgcttcttgttcctcctgctctggagtttccagtaattcatcggcacattacgccaggtgcactgactttatgcgtcattacagccttaataattacgctgcttgccagcttgggcggcaggcttgtctcagttaaatgtatttcggagatttcgtttattcgtcgtcaccggattgagtgcatgatggcgggatttatgatttatttctggacattctctcttattgctggttggtacaagccccagtttaagaaggaatatcagacactccactatgagaatgctaggtattacgttcttgcacgctatgacggtcgtttggttttatcacaatcgtacaggagcgggagtaggaagtttgttataatcaatggcggacatagactttgagattaatgtagtcagagtgcgttaaaattcccttagaaatcgggaataggtagtactagatacgcaggatttaatcagtcgtattgagatggaattgcagagttaaactggcatggattattttgtacccagcccttaagaacaatggtgagagatagtaactcataatcgccaattcactgttttaaatttagtaagggccgctatccgccactggctcatcgggaaagagcatcagccttctaagttgactgtgcgaggttcgagtcctcggtggcggtccagtactgatttagctcagtaggtagggaattgccttgtaatcagtaggtcaccagttcgactcttgctgtctcgccccatattccaataggctcgctttgacggggcttttgtatgtcgcttgcgatatgttacagtaccgttatcagtctgtagaaaatacacacaggagtgaaatgttaaattacccacaactcagagagcggagtgttgtcctgttagtggggaatttgttaaaagaatccagcatggtgaatctccctgtgcggctgtctcttgatcagatctcctgatcaagagacttcatcaccggataaccctcaaccatatcctgaagtctgaaccagccatcccacataactacccaaccagggcggcctgtgcgtttgctgtcatgccatcgccccagtttcagacaggcccatttcagtgtcggcgtctgtgacggaagctgttttccttccagcttaacccacagcagtttccactctgtcggcgtcagtattttcttacagctgtcattttgtgtttcttcactgataccttcctgccgcaggcccagcatccgtaccgcgataaacgccttgataaccaccatgcgctcaaggttatcccgggtctgcattcgcagtgattccacacatgtaccaccacttttccacgccttgtggtattcctctatcagccagcgtcgctcgtaatggctgacgatacgtcgcgcatcggcggcactcgccactttttctgatgtcagcagatgccagcaggcaccgtcctctgactgctcccggcaacagacatacgtgagcgggagcgcctggccgctgttgtcgcgatttttatgctgacttcgctgtacctgatgaacatccgggcctggcgggctgcccgccctcctttttgcatcacattcagcgtgtggcttcccgcggttgccaggacttccggcagttcgaagagcttgccgggtgcttcttccagccggctattctgtgcagtacgcaccacgaagcgctgtccgtggctgactttataatgcaggtaatgccagatatccgcttcccggtcacagacagtgattacccgtttctgtatctcccccagccgttcggccatacgctccgaagcctgctgccagcggtaactttctttttcttcacagggacgttcttttcgctggtgcttaacaccgtaggtgtccgtgacccgactccagcgctgctgttcgataaaaccgaaccgccccgggtttcctggagagtgttttatctgtgaactcaggctgccagatcatcgtttccgatggaagcataataagctttttctgcttctgccggaggagtatggccctgcctttccagcaatcgtcgattgttataccagtccacccacgtgagtgtggtcaaaccgactggcagggcgctgtcaggggcgtacatcaggacagagtgagccagcagcccgcgcgtcttcgggttagtggtggtattcccctggtcatcagatgccgtactgtggctgaagttaatggtggtggtgtcttccagtgcgaggagcagcggatgagcctcacatgcccttacagtggcggtaaatccggcttcggcaatggcttgcggggacacagacgggttacgtatcaggcggtacgcaccttcaacctgagcagtggactgggatgatttcacaatagaaagacctgcatgctgagcgagagaagaggtcagtgacacaaggcgtcgtgtacgacgcggatcaccgagacgggcatgtccagactgctcgttatcccatgaataacaatcagaaagtaccataacagacccgaagaaaatgaaatataagaaaagatcaacgagtgaagaaaaagttcaaaaaatggctgccggggaggaaggaaagtaccggatggaaagagtcccccctaaagcagactgacagacataacaaatccccggggggatttgtgtataagagacagtacttatctggaggtaattgcaatatctctgtgaacttacacagggtgggcttaccgcatacactgacacttagcggatcgacagaacattattaacagagcatcactgaacgctacataatcagagttgcataaataaaatgttatgatataacatcacaatcacaacatttgttttcgaatgtatatgaatgtaatcagaactgtcatttgtacattaattatacttccggtgggattacaggcagcgaccagtcattcttctatggttaaagatacaatcaccattgtcgcgacaggaaatcagaacacggtatttgaaacgccgtcgatggtcagtgtcgtcacgaatgacacaccgtggagtcagaatgcggttacatcggccggcatgctgaaaggtgttgccggtctcagccagactggtgcaggacggaccaatgggcagacctttaatttacgcggctatgacaaaagcggggtacttgttcttgttgacggcgttcgccaactcagtgacatggcaaaaagcagtggcacttatctggatccggcactcgtcaaacgtatcgaagttgtccgcgggccaaactccagtctgtacggcagtggcgggctgggaggtgtagtggacttcagaactgccgatgcagcagattttcttccccccggagagacaaacggtttaagtctgtggggaaatatcgccagtggtgaccacagcacaggctcggggctcacctggtttggtaaaactggaaaaacagatgcgctcctttctgtcattatgcgtaaaagaggtaatatctatcaaagtgatggtgagcacgcacctaacaaggaaaaacctgcagccctgtttgcgaaaggctctgtcggtataacagacagtaacaaagcaggtgccagcttgcgtctctaccggaataacaccactgaaccgggcaattccactcagacacatggtgacagcggcctgcgtgacagaaaaacagtacaaaatgacgtacagttctggtaccagtacgctcctgtggataacagcctcatcaatgtaaagtcaacgttatatctcagtgatatcactatcaagacaaacggtcacaacaaaacggcagaatggagaaacaacagaacctccggtgttaatgttgtcaacaggagtcatactctgatttttccgggagcccatcagttaagttatggcgctgaatattaccgtcagcagcagaagccagaaggctctgccacactatatccggaaggaaacattgactttacatcgttgtatttccaggatgaaatgacaatgaaaagctacccggttaacattatcgtcggttcccgctatgaccggtacaagagcttcaatccccgtgccggagaactgaaagccgaacgcctgtccccaagggcggcgatttcagtctcaccgacagactggctgatgatgtacggctccatatcctctgcattccgagcgcccacaatggcagaaatgtacagggatgatgtacatttttaccgcaagggtaaacccaattactgggttcctaaccttaatctgaaaccagaaaataacatcacccgtgagattggcgcaggtattcaactggatggcctgcttacagacaatgaccggctgcagttaaaaggcggatatttcggaacggatgccagaaactatattgccacacgcgtggatatgaaacggatgcgttcttattcttataatgtatcccgggcccgtatctggggatgggatatgcagggtaattaccagtctgattatgttgactggatgctttcttataaccggacggaaagtatggatgccagcagcagggaatggctgggctccggcaatcctgacacacttatcagtgacatcagcatacctgttggtcatagaggcgtttatgccggatggcgtgctgaactttcagcatcagccacgcatgtgaaaaaaggcgatccccatcaggctggttataccatacattccttttcactgtcttataagcctgtaagtgttaaaggctttgaggcgtcagtaactctggataatgccttcaacaagcttgccatgaatggcaaaggtgtgccgctttcaggcagaactgtcagtctttatacccgttatcagtggtaacctcgcaggaaataaatcatgatgaaaaatacaggctatatcttagctctttgtctgacagcatcggggcatgtcctagcccatgatgtctggattacaggtaaacaggcagagaacaacgttaccgcagagattggttatggtcataatttcccctcaaaggggacaattcctgacagaagggatttctttgaaaatccccggctttataacgggaaagagacaataacactgaagccagcgtccacggattatgtctataaaactgagtctgcaagcaaagataatggttacgttctgtcaacgtatatgaaaccgggatactggtcgagaacctcgtcaggatggaaaccggtcagccgggagggcagaaatgatgtggcttactgtgaatttgtcactaaatatgcaaaatcttttattcctggtgaacagcagatgccagcacaactctatcagtctccaacagggcatgagcttgaaatcattccgttatccgatataagtcgtttcagtgaaaatgtgaagctgaaagttctgtataaaacgtccccgctcgccggagctatcatggagcttgactcggtcagttatctgacatcatcccgtcatactcatgcagttgagcacaaacatcctgttcataaagcagaactcacctttgtaactaatgaggatggtatcgtcacagtaccttctcttcatatcggacagtggctggcgaaagtccaaaataagaaaagttttcaggacaaaagcctgtgtgatgaaactgtcgatgtggcaaccttaagcttctcccgaaattaatgatactattcctgccctgtattttacgggcagggtatatcaaccggaaatagcctactgacatccatgtaaaaaaactcataattattttgttgatgtatcttacctaatacattgatagctccagtttttataccagagcattctcgttgtccctatgtacttgtctgcaatatcactgatatgcaggaataatattcttggcatggagtcagttccccgtcatcttaggtatcactttaactcacaggtgtccagtaaatatgaacaggatcccagtaatcattatcaatggtttccttggcgcaggaaaaaccactcttatgaaaaacctgctcacacaggcaaacaggaatcacttagctgtatctgtcattgtcaatgatatgagcgatctggatgttgatggtgtacttattgcaaatacagaaatcgttaatattgcgaacaataatttcgtgagtatcacatctgatagtatcagcagccagagtgggattaagacggtcgacaaggcaattaaaaatatgctcaggcattatttgcctgacgttatatttgtcgaaacatccggaggtagccacccactgccattaattaagtatctgcagactcatgagcgattacagctaaaatcacttttatcacttgtcgataccgttatgctcaatgatgactataacggagggaaagcactgatacctgcatttcaggagaatcttttccatggcaagcgcagaatagagaatttactggctgagcaaatcatgttttgtagcactttgctgttaaccaaaaaggatcgactgtcattcgacattgtcaccgatgtggcgaaagcaatccatcctctgaatccttacgtaaatgtgatagctgtgtcatgggggaaccttaaactagcagagttactaacccttccggattacgattttaaccgggtcggattacttatcagagaactggaagacacaatcacagtagaagaagcaaaaatttcagcccaaaatggcgaaataatttcgcgagtgattaaagatgacaggccattccacccacaaagattatgggaaacctatcattattttatgggaatgggtatttatcgtagtaaaggctttttctggctaccaggaagacctgacatggctctgctctggaaccaggccgcaggaagtatcaatctggagtttatcagctactggaattccggtgtattggcagaccctgataatcacctgacccacgaagagcgctctgttttgcagaaaaaagtcaataaaactatggggcggtttggagacaggagatgccatttaacgattatagggcgttctgatgaagtccatgattttacctccgccttaattaactgttttctttctgaagaagaaattgtctggtggcaatcaggtggcgttttcgcggatccctggcccgttaatatatcccggctgaactgatgattaacgcgatattgcaaatatggcatatgaatcgatcgtagtttggcattcgaatcgatcatgatttgggtaaacgttcacggagcgccgtattgacgtttatttattgggtgagtacgacgttccatggcaggagttcatcaacacggttagaaggccattccggcaggacgttgaggatatggcgcagatacgattccggatcgataccgttcagtcggcaggcgccgatcagcccgtacagcagcgcactacgctctccaccgtgatcgttgccgaagaacatgtagatgatatgacctttatatactcactatagcattggtgggatattccagaggaggtcatcatgtattcggaaaatattgcggcttacgtcgggctggatgtgcataaagccccctagcagttgctattgttgcatctgaacgacttggcaaggttcgttattatggtatggtacgattaacaacgaagcccagtctgtacgtcgattatttcagaaattgcagggactttacggaaacattctttcctgctatgaagctggcccctgtggttttgggctatatcatcaactcacagcgatgaatataaaatgctaggttattgcctcttcccagatagtaaaatcaccgatagacaggatcaaaaatgatcatcgggatgcaaccgctaccgtttgcctcgttctggaaataaccttgctgatgggggtatggtttggtacgttgtggggatttgtatgtggttttcttcatggaaagacagtggtatgcaaccgggcgttgcatttgtctcaagcatagtcgcaggcatttgctttggtgttctcatggctgtgtaccattagtgtcgaaaggtagttaacaatcttccagactgggacagtctggagtaaagatcgttgtagaggctatatactttttaaatggactgggggtgagatgggaaaaataaaatattggctaatagtaggatttattatactttttgcgattttttacattgctattagtgacagggattctacgctttctaggttgaaatcagcaggtgaaaacggagatgtagaagctcagtatgctttggggctcatgtatttgtatggagaaattctggatgttgattatcagcaggcaaagatttggtatgaaaaagccgctgaccaaaatgatccgcgtgcgcaggccaaactcggtgtgatgtatgcaaatggtctcggggtaaatcaggattatcagcaatcaaaattatggtatgaaaaggcggctgcgcaaaatgatgttgatgcgcaatttttgcttggggagatgtatgacgatggtctcggggtaagccaagactaccagcatgcaaagatgtggtatgaaaaagcggctgctcaaaatgatgagcgtgctcaggtcaatctcgctgttctatacgcaaagggtaatggtgttgaacaggattatcgacaggccaaaagctggtatgaaaaggctgcagctcaaaatagtcctgatgcgcagttcgctcttggaattctgtatgccaatgctaatggtgtagagcaggactatcagcaggcaaaagactggtatgagaaagcagcagaacaaaatttcgccaatgctcagtttaatcttggtatgctctattacaaaggtgagggtgttaaacaaaactttcggcaagccagagaatggtttgaaaaagccgcatctcaaaatcagccgaatgcccaatataatttaggtcagatttattactacggtcagggtgtgactcagagctatcgacaggcgaaagactggtttgaaaaagcggcagagaaaggtcatgtcgatgctcaatataatctcggtgtaatatacgaaaatggtgaaggtgtgagtcagaactatcaacaggcaaaggcttggtatgaaaaggcagcctcacaaaatgatgcgcaggcgcagttcgaacttggcgttatgaatgaactgggtcagggtgaaagcatagacctgaaacaagcaagacattactatgagcggtcatgtaataatgggcttaagaaaggttgtgaacggttaaaagagttattatacaaatagatattataatatttattatatgaggttgtgaattaatggcaatccctgaacgtatgatccccgtaaaagtcagcagcaaaaaaataagagaattagcacagaaagctaaagagatacttgcagctattgatagtggagcaagtgaagaagatgcttttttaaaggacatgatcgatgactggaacagtcaggtagtatgtccatgtgagttttcagattttagagattattcctcttggacaaatgcaaatgaatttacacgaatagcttttaatttggaaaagttctacgaggattttacttgggaggaactggttcaaacgataagctgtgtatgtgatcaaaagtcaaacgaatcggaaaaaatttttgctcttttgttgcttgaaaagaattttcatggaaatccatccgatcttatattctggcccgatgaatggtttcaggatccagatatgttagatgttgaactgagtgttgaagagattgcatgctatttgatggttcgatccggtaggcaactagttgatgcacctgaaatcgacctgaaatatcaaataccccagtctgacgaataaaaaattaatataagtgtagataaatagttatgagcaattacaggaaaaacaagtgtgaaaaaaactgatattgccctgtaaatttaattaattataatgtcccacacttacatggtggagaatatcattgggggcggagtaagaataaaagagttaattctgagcatccatacattttacctatgtcaggtaaaataaactatgggcttgattattcaccattattcatgtttctactaagaaaaacaggtgaaaaatcggatcaagtttatagtgaagcgattctacgactcgatctgcctgatccaaccttctttctagttgctctacacgaaacagaccaaagaaattttgttcggtgcggcaaatccagttattacaatgggctgtatgttgatgagaatggttacttgaaatgttttctccagatttaaaggcatcaggcataccaatattatgtaagtgctgtacttacactctaaacgggaaattattaaatgaataagttgaaatttttctgaccttattaacttaaagaatagacgcatcaattgttttatttcagggcgttaaacacattgtatttataattatgcaaaatttaccaatgttttaacagatccgatagtagctattgttgttttcggagtttggccctgagctgtccatgcctttttagaattatcagtatcaatagatggtaatacctccaattagttgaattaggggtataatagtcgcttttaaggttcttccatggtcacagttaaccttcattgtccctgttgccagcccgttcaggtttaccgtccaatagagttatacttagctgaacctagatttttagcttcgggtatttaaaaataggtattaagaagattgctaactttattgataataacttaaactgtttttagggagcataattaaatgtaattttaggtttgtaatttattatgtttttttgatatgcaaaaatataatgcgagtagaggtacgataaataatatacaaaacattaatacgaataagaataaattccttgatgatccagtatcactaaaaaatctatcccaggatttctttggtattatcttttgcgctgatatttctaaagcataatatgcaaacgggtatgctacagcaccaatagcaaggtatgctgcaacataaggtatataaggaatataagaaggaaatatctttccatcctttaaatcagtcaaaatgttgtaaaccaaagagccacaaccgactaagccccataaacaatgtctgagatagtatctaaatgtcatattatataccttaatgatatgaaatagggtacatatggattcaagtaggcagtttccgcaaactgaaagccattaactctgataggccgctatgagtgggccatttgggttttgcccatgatcacagtcatagttctggaaaatggctgtgctctttaaataaatgtctttaactcctcagtgtttatattcgccagcattgaagcctttaaatgtgggaatgtacgaggtatctggaaatcagtttaaaacctttggtatattccagccatcttggcaagtccccggttccgaacaaccaagcgttacaatcgtaatcagtactataccagttttcaagcaaatgcagcctgtacggttgaacaatatctgatgtgagtttttctctggggtcaggttcaccagcaaaaagctcaagcgaaaagtgccctgcaagcccttcagagactatgacttctcctaaagttgagccgtatctcggcccatctaacagcacgatgcagttcatgtgcaaacattcgagcaatggagtgcgcataatttttgcaaaattatggattttctggagctactgttctatagacaactccagcttcagggtaaaaaccatgatgccctttctccgggaggacaagtttccctactttaaccaccacgtccagtgaaggaatcggcattaaccttttaactagttcgtaggtatcagtcaggttgatttgaagccattcatagtgagcagtgagtttcttttgggtattaagaaaatagaggggcatttgagacataacggtaccactcaaaagagtcagtaaatcgctacatgttaacacacaacgtaaatgttgtggtgtaagcacagtagtagaggaccagactgttacccatcatacctgctcttagggcagagcaaacccaaaccatcaaaatagctctggcttttgtgtcatagctgtctcaggttaagtctgagctaatatattaattaaaacagtccattcgccatgtattattaaatagttagttaccatttgataattaatatgaaattacttcacaggaatctctctattattatttattcgtttttatccttcaggtaataggtcttcatataggtcaagcgatgaccattaaacatatagcctgggttaataaagtaatagttctgtatcatggtctctgcaataaacttcttgtcagcaagttctttcatgcctttgaaatattttttctggatctttttacaacatcttgatcgacaatattccatatagctggaaaaattttcgctgataaaacggttgaaaagtgcgcccaaaatgtactgtttaaaatcccatccgtcgacagaccctctgacatcattgaccatttgccctatcaggtgttgcagccctgctcgttattgaatgcctgtcatttttaattcgttttcctggttcaggtatgaatcatcaggggctattctacagcaaacgcgtggctcaggtagcccgtaagtaagtcggtggactccgggttattcatggcagggaggcgtggccgaatacttctctcctttgctgtatgtctggcacatcctaaataatttcagacagatattatctccgtgaatcccccgccacctttccggtgcgcggggttttgtctttttttaccgggaatacatgtatgaatccgtctgatgccattgaggcaattgaaaaaccgctctcctccctgccttattcactttcccgtcacatcctggaacatctgcgcaaactcaccagccacgaacccgtgattggcattatggggaaaagcggggccggtaaatcctcactctgtaatgcactgtttcagggggaggtcaccccggtcagtgatgttcacgctggcacccgggaagtgcggcgcttccgtctgagtggccacggtcacagcatggttatcactgacctgcccggggtgggcgagagccgggacagggatgcagagtatgaagccctgtaccgtgacattctgccagaactggacctggtactgtggctgattaaagccgatgaccgtgccctgtctgtggatgagtatttctggcgacacatcctgcaccggggacatcagcgggtactgtttgtggtgacgcaggccgataaaacggagccctgccatgaatgggatatggccggtattaagccttctcccgcacaggcacagaatattcgcgaaaaaacggaggcgctattccgtctgttccggcccgtacatccggttgttgccgtatcggcccgcaccggctgggagctggatacgctggtcagtgcgctcatgacagcgcttcccgaccatgccgccagtcccctgatgacccgcctgcaggacgggctgcgcacggagtctgtccgctctcaggcccgtgaacagtttaccggtgcggtggaccggatatttgacacagcggagagcgtctgtgttgcctctgttgtccgtacggccctgcgcgctgttcgtgacaccgtggtctctgttgcccgcgcggtatggaactggattttcttctgaacctgttgtagatgatgccctccctgcctctgagccatctcacaaaaagcgcggttttcattgccacctttcttgtccgtgcaacaatcaggtaatagaataaaacgatcgataactatttaatcgatcgtttatatcgatcgttatgctaataataacacccgttagcaatgtatgcagacacacagacatgagattcagggaacaacagagccacacgtcagaaacttccatcagccggatctgcggcactgtaacccttcacctgcaggtatccacatttgtggataccggctttttattcaccctcactctgataaggaaatgctgatgaaacgacatctgaataccagctacaggctggtatggaatcacattacaggcgctttcgtggttgcctccgaactggcccgtgcacgggggaaacgcgccggtgtggcggttgcactgtctcttgccgctgccacgtcactcccggcgctggctgctgactctgttgtaccggcaggagaaaccgtgaacggtggaacgctgataaatcacgaccgccagtttgtctcaggtacggctgatggaatgactgtcagcaccggactggagctgggggcggactctgataacaacaccggcggtcagcagatagcccggggtggaacagccagaaacaccagagtcaccgcaaacggtctacaggatgtcatggcaggtggcagtacctcggatacggttatcagtaccgggggagggcagaatttgcgtgggaaggcttccggtactgtccttaacggcggtgatcaatggatacatgcaggcggcagggcatccggaacggtgattaaccaggatggttaccagaccattaaacatggcggactggtaaccggaaccatcgtcaacaccggtgcagaaggtggtccggattctgaaaatgtgtccaccggtcagatggtcggggggattgctgaatccaccaccataaacaaaaatggccggcaggttatctggtcttcggggatagcccgggacactctcatttacacaggaggtgaccagacggtacacggagaggcacataacacccgactggagggagggaaccagtatgtgcacaagtatggacttgcactgaacacggtaattaacgaggggggctggcaggttgttaaggccggtggtactgccggtaacaccaccataaatcagaacggcgagctgagggttcatgccggcggtgaagcgtctgatgtcacccagaacacgggaggtgcactggttaccagcactgctgcaactgtcaccggtacaaaccgcctgggagcattctctgttgtggagggtaaagctgataatgtcgtactggaaaatggcggacgtctggatgtgctgagcggacacacagccaccagaacccttgtggatgatggcggaacgctggatgtccgcaacggtggtaccgccactgccgtatccatgggaaatggcggggtactgctggccgattccggggccgctgtcagtggtacccggagcgacggaacggcattccgtatcgggggcggtcaggcggatgccctgatgctggaaaaaggcagttcattcacgctgaacgccggtgatacggccacggataccacggtaaatggcggactgttcactgccagagggggctcgctggcgggcaccaccacgctgaataacggtgccacgtttacccttgccgggaagacggtgaacaacgataccctgaccatccgtgaaggtgatgcactcctgcagggaggcgctctcaccggtaacggcagggtggaaaaatcaggaagtggcacactcactgtcagcaacaccacactcacccagaaagccgtcaacctgaatgaaggcacgctgacgctgaacgacagtaccgtcaccacggatatcatcgctcatcgcggcacggccctgaagctgaccggcagcacagtgctgaacggtgccattgaccccacgaatgtcaccctgacatccggtgccacctggaatatccccgataacgccacggttcagtcggtggtggatgacctcagccatgccggacagattcatttcacctccgcccgcacagggaagttcgttccgacaactctgcaggtgaaaaacctgaacgggcagaatggcaccatcagcctgcgtgtacgcccggatatggcgcagaacaatgctgacagactggtcattgacggtggcagrgcaaccggaaaaaccatcctgaatctggtgaacgccggcaacagtggtacgggkctggcgaccaccggtaagggtattcaggtggttgaggccattaacggtgccaccacggaggaaggggcttttgtccaggggaatatgytgcaggccggggcctttaactacaccctcaaccgggacagtgatgagagctggtatctgcgcagtgaagaacgttatcgtgctgaagtccccctgtacgcctccatgctgacacaggcaatggactatgaccggattctggcaggctcccgcagccatcagaccggtgtaaacggtgaaaataacagcgtccgtctcagcattcagggcggccatctcggtcacgataacaacggcggtattgyccgtggkgccacgccggaaagcagcggcagctatggcttcgtccgtctggagggtgacctgctcagaacagaggtygccggtatgtcactgacgacaggagtgtatggtgctgcaggccattcttccgttgatgttaaggatgatgacggctcccgcgccggcacggtccgggatgatgccggcagcctgggcggatatatgaacctgacacacacctcctccggcctgtgggctgacattgtggcacagggaacccgccacagcatgaaagcgtcatcggacaataacgacttccgcgcacggggccggggctggctgggctcactggaaaccggtctgcccttcagtatcactgacaacctgatgctggagccacggctgcagtacacctggcaggggctttcgctggatgacggtaaggacaacgccggttatgtgaagttcgggcatggcagtgcacagcatgtgcgtgccggtttccgtctgggcagccacaacgatatgacctttggtgaaggcacctcatcccgtgcccccctgcgtgacagtgcaaaacacagtgtgcgtgaactgccggtgaactggtgggtacagccttccgttatccgcaccttcagctcccggggtgatatgcgtgtggggacctccaccgcaggcagcgggatgacgttctctccctcacagaatggcacttcactggatctgcaggccggactggaagcccgtgtccgggaaaatatcaccctgggcgttcaggccggttatgcccacagcatcaacggcagcagcgctgaaggttataacagtcaggccacactgaatgtgaccttctgataattctgcattgcctctctgtggtcccggtcatcatgaccgggacccggacgggggaaaacgtttcagtgccacattcactgacattcacaataacatgatattcatcacggagtgactatgttacagatagtcggcgcgctgattctgctgatcgcaggatttgccattcttcgccttttgttcagagcattaaccagcacagcgtctgcgctggcagggttcatattgctgtgtctgttcggtccggctttactggctggctatatcactgaacgcataacccggttattccatattcgctggctggcaggcgtatttctgacgattgccggaatgatcatcagcttcatgtggggacttgatggtaaacatatcgcactggaggctcatacttttgactctgtaaaatttattctgaccaccgctctcgccgctggtctgctggctcttcccgtgcagataagaaccattcagcagaacgggctcacacctgaagatatcagcaaggaaattaacgggtattactgctgtttttatactgcttttttccttatggcgtgttctgcatacgcaccattgatcgcattgcagttcgatatttcaccctcactgatgtggtggggcgggttgttgtactggctggctgcattagtgacgctgctatgggcggccagccagatccaggcgctgaaaagactgaccagtgccatcagccagacactggaagaacaaccggtgctcaacagtaaatcgtggctgagcagtttgcaaaacgattacagccttcctgaaacgctgacggagcgcatctggctgacactcatttcacaacggatttcccggggagaactgagggaatttgaactggcagacggaaactggctactggacaatgcctggtatgaaagaaacatggcgggtttcaacgaaaagctgagagagagcctgtcatttacccctgatgaactgaaaaccctcttccggaaccgcctgaatttatcaccggaagcgaatgacgattttctcgatcgttgcctggacggcggtgactggtaccccttttcagaaggccgccgttttgtatcattccaccacgtggatgagcttcgtatctgtgcctcctgcgggctgacagaagtacatcatgccccggaaaatcataagccggatccggaatggtactgctcctctctttgtcgcgaaacagaaacactgtgtcaggacatttatgaacgttctcacaccggttttatttccgatgcaacggcgaatggtctgattctcatgaaactgccggaaacctggagtacaaatgagaaaatgtttgcttccggagggcagggacatgggtttgccgctgaacggggaaaccatattgtcgacagagtccgtctgaaaaacgcacggatcctcggtgataataatgccagaaatggagcagacagactggtcagcggaacagaaatccagacgaaatattgttcaactgcagtccgtagcgtcggtgcggcattcgacggacaaaacggacagtatcgttacatgggaaatcatggtcccatgcaactggaagtcccccgtgatcagtatgccggcgctgtggaaaccatgaagaataagatccgcgaaggtaaagtacccggtgtaaccgatcccgcagaagcgtcccggctgattcgtcggggacatctgacttatacccaggcccgtaatatcacccggttcgggaccatcgaatcggtcacttatgatattgccgaggggtcggttgtcagtctggcggccggagggatcagttttgccctgacggcatcggtcttctggctcagcaccggcgatcgcgatgctgccctgcagacagctgctgtccaggcaggaaaaaccttcacccgcacactggctgtctacgtcacaacccagcaacttcaccggctcagtgttgttcagggtatgctgaagcatattgatttttcgacggccagcccgactgtccggcaggcgcttcagaaggggaccggtgcaggaaatatcagggcgcttcagaaggggaccggtgcaggaaatatcagtgccctgaacaaagtgatgaagggtacgctggtgacatctctggcactggtagctgtcacaaccggccctgacatgatcaaaatgttgcggggacggatctccggtgcgcagttcatcaggaatcttgccgtggcatcttcctgtgtggcaggtggtgctgtcgggtcagtggcgggcgggatattgttcagtccactgggaccatttggtgcactgacagggcgtgtggttggcggtgttctggggggaatgattgcctccgctgtatcaggaaaaattgccggagcgctggttgaagaagatcgcgtcaaaattctggcaatgattcaggagcagatgacatggcttgccggcagtttcctgctgaccggacatgagattgaaaatctgaacgcgaatctggcccgtgttatcgatcagaatgctctggagatcattttcgccgccggtatacaacaacgggccgcgaccaacatgttaatcaaaccactggtggtcagtatcatcaggcaacgccccgtcatggaatatgatgcatcccatctcggcaatatggttaaccgactggaagaaacattacccccggagttaccggcataacggctattctgcgccttttacgttttatcacctgatttgtcagtgtcatcgtcatgactcagagaggtaaataccatgattcacctgttcaaaacctgcatgattaccgccttcattctggggttaacgtggtctgccccactccgggcacaggatcaacgttacatcagtatacgcaatacagatacgatatggctcccgggaaatatttgtgcttaccagttccggctggataatggcggaaacgatgaaggatttggccccctcaccatcactctgcaactcaaagacaaatatggtcagacgctggtgaccagaaaaatggaaacggaagcctttggtgacagtaatgccacgcgaaccacagacgcatttctggaaacggagtgcgtggaaaatgtcgccacaaccgaaatcattaaagcaactgaagaaagtaacggccatcgtgtcagtctgccgttatcggttttcgatccccaggactaccatccactgctgattaccgtttccggaaaaaatgttaactgatccctgaagtcagtttcatgcttcagcctctgccacaacgtatggcagaggctatttatcaggagaaaccagatatgctgggttacacagagtatgtcctggctgaaggatctttctcatacgggcaggcggttgctgtcataaccgcttaccacaatgtgtttatccaggatgacccgggaatgcatttccgtcgggttatccgcaacgcggaaggtcagcgacgctgacgcagccggaactctgaagctgatgccggaaaacagcttaatgcgtggctcgccagtggagggcttctcagacaataaacctcgtcagtatcatcaggcaacgccccgtcatggaatatgatgcatcccatctcggcaatgtggttaaccgactggaagaaacattacccccggagttaccggcataacggctattctgcgccttttacgttttatcacctgatttgtcagtgtcatcgtcatgactcagagaggtaaataccatgattcacctgttcaaaacctgcatgattaccgccttcattctggggttaacgtggtctgccccactccgggcacaggatcaacgttacatcagtatacgcaatacagatacgatatggctcccgggaaatatttgtgcttaccagttccggctggataatggcggaaacgatgaaggatttggccccctcaccatcactctgcaactcaaagacaaatatggtcagacgctggtgaccagaaaaatggaaacggaagcctttggtgacagtaatgccacgcgaaccacagacgcatttctggaaacggagtgcgtggaaaatgtcgccacaaccgaaatcattaaagcaactgaagaaagtaacggccatcgtgtcagtctgccgttatcggttttcgatccccaggactaccatccactgctgattaccgtttccggaaaaaacgttaactgatccctgaagtcagtttcatgcttcagcctctgtcacaacgcgtggcagaggctttttatttatcaggagaaaacagatatgctgggttacacagagtatgtcctggctgaaggatctttctcatacgggcaggcggttgctgtcataaccgcttaccgcaatgtgtttatccaggatgacccgggaatgcatttccgtcgggttatccgcaacgcggaaggtcagcgacgctgacgcagccggaactctgaagctgatgccggaaaacagcttaatgcgtggctcgccagtggagggcttctcagacaataaacgtcattcatttcatccatcaggccgcgtcttctccgggagacgtggctttttcatttattacaccagtaaatcttaaccaccgataaggagcaaattatgcgactagccagtcgttttggttatacgaaccagatacgccgtgaccgtccgctgacacacgaagaactgatgcactatgttcccagtattttcggtgaagaccggcatacttcccgcagtaaacgatatgcgtacattcccaccatcaccgtactggaaagcctgcagcgggaaggctttcagccattcttcgcctgccagacccgtgtgcgcgacccgggccgccggggatacactgtgtcaggacatttatgaacgttctcacaccggttttatttccgatgcaacggcgaatggtctgattctcatgaaactgccggaaacctggagtacaaatgagaaaatgtttgcttccggagggcagggacatgggtttgccgctgaacggggaaaccatattgtcgacagagtccgtctgaaaaacgcacggatcctcggtgataataatgccagaaatggagcagacagactggtcagcggaacagaaatccagacgaaatattgttcaactgcagtccgtagcgtcggtgcggcattcgacggacaaaacggacagtatcgttacatgggaaatcatggtcccatgcaactggaagtcccccgtgatcagtatgccggcgctgtggaaaccatgaagaataagatccgcgaaggtaaagtacccggtgtaaccgatcccgcagaagcgtcccggctgattcgtcggggacatctgacttatacccaggcccgtaatatcacccggttcgggaccatcgaatcggtcacttatgatattgccgaggggtcggttgtcagtctggcgccggagggatcagttttgccctgacggcatcggtcttctggctcagcaccggcgatcgcgatgctgccctgcagacagctgctgtccaggcaggaaaaaccttcacccgcacactggctgtctacgtcacaacccagcaacttcaccggctcagtgttgttcagggtatgctgaagcatattgatttttcgacggccagcccgactgtccggcaggcgcttcagaaggggaccggtgcaggaaatatcagtgccctgaacaaagtgatgaagggtacgctggtgacatctctggcactggtagctgtcacaaccggccctgacatgatcaaaatgttgcggggacggatctccggtgcgcagttcatcaggaatcttgccgtggcatcttccggtgtggcaggtggagctgtcgggtcagtggcgggcgggatattgttcagtccactgggaccatttggtgcactgacagggcgtgtggttggtggtgttctggggggaatgattgcctccgctgtatcaggaaaaattgccggagcgctggttgaagaagatcgcgtcaaaattctggcaatgattcaggagcaggtgacatggcttgccggcagtttcctgctgaccggacatgagattgaaaatctgaacgcgaatctggcccgtgttatcgatcagaatgctctggagatcattttcgccgccggtatacaacaacgggccgcgaccaacatgttaatcaaaccactggtggtcagtatcatcaggcaacgccccgtcatggaatatgatgcatcccatctcggcaatatggttaaccgactggaagaaacattacccccggagttaccggcataacggctattctgcgccttttacgttttatcacctgatttgtcagtgtcatcgtcatgactcagagaggtaaataccatgattcacctgttcaaaacctgcatgattaccgccttcattctggggttaacgtggtctgccccactccgggcacaggatcaacgttacatcagtatacgcaatacagatacgatatggctcccgggaaatatttgtgcttaccagttccggctggataatggcggaaacgatgaaggatttggccccctcaccatcactctgcaactcaaagacaaatatggtcagacgctggtgaccagaaaaatggaaacggaagcctttggtgacagtaatgccacgcgaaccacagacgcatttctggaaacggagtgcgtggaaaatgtcgccacaaccgaaatcattaaagcaactgaagaaagtaacggccatcgtgtcagtctgccgttatcggttttcgatccccaggactaccatccactgctgattaccgtttccggaaaaaatgttaactgatccctgaagtcagtttcatgcttcagcctctgccacaacgtatggcagaggctatttatcaggagaaaccagatatgccgggttacacatggtagctgtcacaaccggccctgacatgatcaaaatgttgcggggacggatctccggtgcgcagttcatcaggaatcttgccgtggcatcttccggtgtggcaggtggagctgtcgggtcagtggcgggcgggatattgttcagtccactgggaccatttggtgcactgacagggcgtgtggttggtggtgttctggggggaatgattgcctccgctgtatcaggaaaaattgccggagcgctggttgaagaagatcgcgtcaaaattctggcaatgattcaggagcaggtgacatggcttgccggcagtttcctgctgaccggacatgagattgaaaatctgaacgcgaatctggcccgtgttatcgatcagaatgctctggagatcattttcgccgccggtatacaacaacgggccgcgaccaacatgttaatcaaaccactggtggtcagtatcatcaggcaacgccccgtcatggaatatgatgcatcccatctcggcaatatggttaaccgactggaagaaacattacccccggagttaccggcataacggctattctgcgccttttacgttttatcacctgatttgtcagtgtcatcgtcatgactcagagaggtaaataccatgattcacctgttcaaaacctgcatgattaccgccttcattctggggttaacgtggtctgccccactccgggcacaggatcaacgttacatcagtatacgcaatacagatacgatatggctcccgggaaatatttgtgcttaccagttccggctggataatggcggaaacgatgaaggatttggccccctcaccatcactctgcaactcaaagacaaatatggtcagacgctggtgaccagaaaaatggaaacggaagcctttggtgacagtaatgccacgcgaaccacagacgcatttctggaaacggagtgcgtggaaaatgtcgccacaaccgaaatcattaaagcaactgaagaaagtaacggccatcgtgtcagtctgccgttatcggttttcgatccccaggactaccatccactgctgattaccgtttccggaaaaaatgttaactgatccctgaagtcagtttcatgcttcagcctctgccacaacgtatggcagaggctatttatcaggagaaaccagatatgccgggttacacacagagtatgtcctggctgaaggatctttctcatacgggcaggcggttgctgtcataaccgcttaccacaatgtgtttatccaggatgacccgggaatgcatttccgtcgggttatccgcaacgcggaaggtcagcgacgctgacgcagccggaactctgaagctgatgccggaaaacagcttaatgcgtggctcgccagtggagggcttctcagacaataaacctcattgatttcatccatcaggccgcgtcttctccgggagacgcggcttttttcatttattgcaccagtaaatcttaaccaccgataaggagcaaagtatgcgattagccagtcgttttggttatactgcaaaccagatacgtcgtgaccgtccactgacacatgaagagctgatgcaccatgtgccggggattttcggggaagagaaacacacgtcccgaagccagaactatacgtacatccccaccatcaccgtactggaaagcctgcagcgggaaggctttcagccattcttcgcctgccagacccgtgtgcgcgacccgggccgccggggatacaccaaacacatgctgcgtctgcggcgggccggagagataaacggagagcatgtccctgaaattattctgctcaactctcatgacggtacctccagctaccagatgctgccgggttacttcaggttcgtctgccagaacggctgcgtctgtggtcagtctctgggggaagtgcgtgttccacaccggggagacgtagtggagaaagttattgaaggggcttacgaggtggtgggcgtgtttgaccggatagaggagaagcgtgatgccatgcagtcgctggtcctgccgccaccggcacgccaggcgctggcacaggcggcactgacttaccgttatggtgacgaacatcagcccgtcaccaccgccgacattctgacgccacgacgccgggaggattacggtaaggacctgtggagtgcttatcagaccatccaggagaatatgctgaaaggcgggatttccggtcgcagtgcaaaaggaaaacgtatccatacccgggccattcacagcattgataccgacattaagctcaaccgtgcattgtgggtgatggcagaaacgatgctggagagcctgcgctgatgcaatctgtccctgaaggcgtgattcaggcaccagaatcacccgacgccccggaggcgctgccggggtgtcgttccatttctgatgatgacctgtgcgcctggtgtacccgtctgctttaccgtcccggagaagctcagtctgtgcagactgagtacaggcaatggcatctggccatccgtctgtgaccggaacggttacgcgtacggctgtccggaatttcagccgaatatcattcatccctgacattaccgggtctcacggtcagtgatgaacgtgatgttgtcagcccccggcctttactccctctcatttattcacattacaaggatttcatacatgaaaacattgtctcagaacaccacctcttcggcctgtgcaccggagactggcctgcaacaactggttgccaccatagtccctgatgaacagcgcatcagcttctggccgcagcattttggcctcattccacagtgggtgaccctggagccccgggtcttcggctggatggaccgtctgtatgaagactactgcggtggtatctggaatctgtacaccctgaacaacggtggcgcatttatggcacccgaaccggatgacgatgatgacgaaacatgggtgctgtttaacgtcatgaacggtaaccgcgctgaaatgagcccggaagccgccggcattgccgcctgtctgatgacgtacagtcatcacgcctgccgtacggagtgttatgccatgacggttcattattaccgtctgcgggattacgccctgcagcatccggaatgcagcgccattatgcgcattattgactgaaagggggcaggaacaatgcaacagatttcctttctgcccggagaaatgacgcccggcgagcgcagtctcattctgcgggccctgaaaaccctggaccgccatcttcatgaacccggcgtggccttcacctccacccgtgcggcacgggaatggctgattctgaacatggcgggactggagcgtgaagagttccgggtgctgtatctgaataaccagaatcagctgattgccggtgaaaccctcttcaccggcaccatcaaccgcacggaagtccatccccgggaagtgattaaacgcgccctgtatcacaatgccgcagccgtggtgctggcacacaatcacccgtccggtgaagtcacccccagtaaggcagaccgccttatcacggaacgtctggtacaggcactgggcctggtggatatccgggtgccggaccatctgatagtcggtggcagccaggttttctcctttgccgaacatggtctgctttaacccgtcacaaccacatcacacctgttttcacttttatcttctgtcttctgtcttcagaggtatcccattatgaaaatcatcacccgtggtgaagccatgcgtattcaccaacagcatcctgcatcccgtctttttccgttctgtaccggcaaataccgctggcacggcagcactgaagcgtataccggtcgtgaagtgcaggatattcccggtgtgttggccgtgtttgctgaacgtcgtaaggacagttttggcccgtatgtccggctgatgagcgtcaccctgaactgaatcaggacgggcattcagatgagcagcattatcaccatcacagtgtatacgctggatgaactttcctgcccggcacggggaaaagcccgcgactggtaccgtcagcatcatgctgacagcaactggtatgaaaacgtgtatgaagacttcagggaggtctgtggcattttcgggattgacctccgccagcgcgttttccggctcagcaatggcaggtttatggaagagccgtgcatctggttcagcggattctgcagccagggggacggagcctgttttgaagggcgctggcactggcagccagcgacaccccggaaaatcagggaatatgcccctcaggaccgtgagcttcatcgtatcgcggataccctgcaggcggtgcagaaacgtaacttctggcagcttcaggctgaaatcagtcaccggggacgttactgccatccgtacagcatggatatcaccgtcacccggaacagtccgactggtcaggcaatgacaaccgatgcggaagccgctgtcagcgaagccctgcgcgacctggccttctggttgtaccgtcaactggaaaacgagtacgactggctgacctcagacgccgctgtggatgaggccctgctcatcaacgaatacaccttcaccgaagccggtctgtgcaccggctgacccgtcatcgttaaactatcattcaccgattttctgtgaggactttatcgtgtcagacacgctccatgaaacaaattatcccgacgacaacaacgaccgcccctggtgggggctaccctgcaccgtgacgccctgtttcggggcacgtctggtgcaggagggcaatcagttgcattaccttgccgaccgcgccggtatcagagggcagttcagcgacgcggatgcataccatctggaccaggcttttccactgctgatgaaacaactggaactcatgctcaccagcggtgaactgaatccccgccatcagcataccgtcacgctgtatgccagagggctgacctgcgaagccgacaccctcggcagctgtggttacgtttatatggctgtttatccgacactggcacccgcaaccacctcataaccccgaatatctcacctttagcactaccagttacagagaacttaagatgaaaacattacctgacacacacgtacgggaggcatcgcgctgcccgtctcccgtcaccatctggcagacactgctcacccgactgttggaccagcattacggcctcacactgaatgacacaccgttcgctgatgaacgtgtgattgagcagcatattgaggcagggatttcactgtgtgacgcggtgaactttctcgttgaaaaatacgcgctggtacgaactgaccagccgggattcagcgcaggagtcccgtcgcagttaatcaacagcatcgatattctccgggcccgccgggcaaccggcctgatgacccgcgacaattacagaacggtaaatgacattaccctgggcaggcatccggaggaggcgaaacaatgaacctttccctgacgccggaggccgacggcattaacgtacaggcgatgaacatggggcgcattgtcgttgacgtcgatggtgttaattttgctgaactgattaacgtggcctgcggcaatggctactcccttcgtgttgttgatgaatctgaccggaccgcaactgacagcatgccaccctccgctgccctgagcggtatacgctgcagcacctcacatatcacggaaacagacaacgcttggctgtactcgctgtcgcatcagacgaatgacaccggcgaatcagaatggattcattttacaggcagcggatatctgttacgtaccgatgcgtggtcatacccggttctgcggcttaaacgcctgggcctgtcaagaacgttccgtcgtctggtcgtcactctcacccggcgttatggcgtcagtctcattcatctggacgccggcgcagaatgtctgccgggtttacccactttcgactggtaatcaggacaaaagacactggatgaaattattaaccacagaaacggcgctggatattctgattgcgtggctgcaggacaatattgactgcgaatcagggattatcttcgacaacgatgaggataaaacggattcggcagcactgttgccctgtattgaacaggctagggaggatatccgtatcctgcgccaactgcagtttctgcaacaaaaccggtgagtctcactcaccatacttcattccactgacgccagcctgaacagggctggcgttttcattttcatttatctgcgaaaaggaatatcgattatgtctgcaatcacagtctcccgtccggaagtggtcaacgggcatacggacgttatctgctcaaccagtatccgccacattctggctgtacgaaagagtacactgctgcaaatcgacacacttatccggcaactggctgaaatctcatcaatgacagaaagtattggcggtaaaaccgcactggactgggccatgaaacaggattttcgctgtggttgctggctgactgagaaaccggaaaccgcaatgaaagccattacccgcaaccttgaccgtgaaatctggcgtgacctgatgcaacgctccgggatgctgtcattaatggatgcgcagacccgtgatacatggtaccgatcactggagtacgataattttccggaaatcagtgaagagaatattctgagtacgtttgagcagctacaccagaataaggatgaagtgtttgagcgaggagtgatcaacctcttcagagggttgagctggaattacaaaaccaattgcccctgtaaatttggcaataaaattatcgtcaacaatctggtgaggtgggaccggtggggattgcatcttatcaccgggcaacaggcagatagacttgccgacctggaaagaatgctgcatctgttcagcggcaaaccgatccccgacaacagggaaaacataactattcatctggacgatcacatccggtctcttcagggaaaagaatgctatgaagatgagatgttcattattaaatactttaagaagggctctgcgcacatcacgttcaggaagccagaactggttgacagactgaatgatattatcgcaagaacactatcctgacatgctggcagtatagctttgccagtatgctcaaagctcggaaattgtccgataagatatgatcgtggggcatataaaccggtttcagatggcatacccggtggcatactgtctggaaggataaataaaaaagcgcatgttaaacaataacatgcgcttgtaatctggcggtgagggggggattcgaacccccgatacgttgccgtatacacactttccaggcgtgctccttcagccactcggacacctcaccaaattgttgttcctgtcttgctggaacgggcgctaatttagggaaatcatgacctgaggtcaacaaacttttttaaaaaatcgcgcgtttattcaaacttcaatcaatatgcagttttaataagcgaaatctgctttttttgccaccgaccacggatttgttatgctggtggcctttgtagatcataacgataagtgcgaataaattttgcgcaacgcttttcgggagtcagtatggacatcatcttttatcacccaacgttcgatacccaatggtggattgaggcactgcgcaaagctattcctcaggcaagagtcagagcatggaaaagcggagataatgactctgctgattatgctttagtctggcatcctccagttgaaatgctggcagggcgcgatcttaaagcggtgttcgcactcggggccggtgttgattctattttgagcaagctacaggcacaccctgaaatgctgaagccttctgttccactttttcgcctggaagataccggtatgggcgagcaaatgcaggaatatgctgtcagtcaggtgctgcattggtttcgacgttttgacgattaccgcatccagcaaaatagttcgcattggcaaccgcttcctgaatatcatcgggaagattttaccatcggcattttgggcgcaggcgtactgggcagtaaagttgcacagagtctgcaaacctggcgcttcccgctgcgttgctggagtcgaacccgtaaatcgtggcctggcgtgcaaagctttgccggacgagaagaactgtctgcatttctgagccaatgccgggtattgattaatctgttaccgaatacccctgaaaccgtcggcattattaatcaacaattaatcgaaaaattaccggatggcgcgtatctcctcaacctggcgcgtggtgttcatgtcgtggaagatgacctgctcgcggcgctggatagcgggaaagttaaaggcgcaatgttggatgtttttaatcgtgaacccttaccgccggaaagtctgctctggcaacatccacgcgtgacgataacaccacatgtcgccgcgattacccgtccagctgaagctgtggagtacatttctcgcaccattgcccagctcgaaaaaggggagaggctctgcgggcaagtcgaccgcgcacgcggctactaataaagcatctggtttcctgctatccttggcgggaattgaatacaggagagagttatgtatcccgtcgaccttcatatgcataccgttgccagcacgcatgcatatagcacattgagtgattacattgcccaggccaaacaaaagggcattaaactttttgcgatcaccgatcatggcccggatatggaagatgcgccgcatcactggcacttcattaacatgcgtatctggccgcgagtggttgatggggttgggatcctacgcggcatcgaagctaacattaaaaatgttgacggtgaaattgactgcaaaatgtttgattcgctggatctgattattgccggttttcatttaatggatgcgcagacccgtgatacatggtaccgatcactggagtacgataattttccggaaatcagtgaagagaatattctgagtacgtttgagcagctacaccagaataaggatgaagtgtttgagcgaggagtgatcaacctcttcagagggtgagcttgagctggaattacaaaaccaattgcccctgtaaatttggcaataaaattatcgtcaacaatctggtgagtgggaccgtggggattgcatcttatcaccgggcaacaggcagatmgacttgccgacctggaaagaatgctgcatctgttcagcggcaaaccgatccccgacaacagggaaaacataactattcatctggacgatcacatccggtctcttcagggaaaagaatgctatgaagatgagatgttcattattaaatactttaagaagggctctgcgcacatcacgttcaggaagccagaactggttgacagactgaatgatattatcgcaagaacactatcctgacatgctggcagtatagctttgccagtatgctcaaagctcggaaattgtccgataagatatgatcgtggggcatataaaccggtttcagatggcatacccggtggcatactgtctggaaggataaataaaaaagcgcatgttaaacaataacatgcgcttgtaatctggcggtgagggggggattcgaacccccgatacgttgccgtatacacactttccaggcgtgctccttcagccactcggacacctcaccaaattgttgttcctgtcttgctggaacgggcgctaatttagggaaatcatgacctgaggtcaacaaacttttttaaaaaatcgcgcgtttattcaaacttcaatcaatatgcagttttaataagcgaaatctgctttttttgccaccgaccacggatttgttatgctggtggcctttgtagatcataacgataagtgcgaataaattttgcgcaacgcgttttcgggagtcagtatggacatcatcttttatcacccaacgttcgatacccaatggtggattgaggcactgcgcaaagctattcctcaggcaagagtcagagcatggaaaagcggagataatgactctgctgattatgctttagtctggcatcctccagttgaaatgctggcagggcgcgatcttaaagcggtgttcgcactcggggccggtgttgattctattttgagcaagctacaggcacaccctgaaatgctgaagccttctgttccactttttcgcctggaagataccggtatgggcgagcaaatgcaggaatatgctgtcagtcaggtgctgcattggtttcgacgttttgacgattaccgcatccagcaaaatagttcgcattggcaaccgcttcctgaatatcatcgggaagattttaccatcggcattttgggcgcaggcgtactgggcagtaaagttgcacagagtctgcaaacctggcgcttcccgctgcgttgctggagtcgaacccgtaaatcgtggcctggcgtgcaaagctttgccggacgagaagaactgtctgcatttctgagccaatgccgggtattgattaatctgttaccgaatacccctgaaaccgtcggcattattaatcaacaattaatcgaaaaattaccggatggcgcgtatctcctcaacctggcgcgtggtgttcatgtcgtggaagatgacctgctcgcggcgctggatagcgggaaagttaaaggcgcaatgttggatgtttttaatcgtgaacccttaccgccggaaagtctgctctggcaacatccacgcgtgacgataacaccacatgtcgccgcgattacccgtccagctgaagctgtggagtacatttctcgcaccattgcccagctcgaaaaaggggagaggctctgcgggcaagtcgaccgcgcacgcggctactaataaagcatctggtttcctgctatccttggcgggaattgaatacaggagagagttatgtatcccgtcgaccttcatatgcataccgttgccagcacgcatgcatatagcacattgagtgattacattgcccaggccaaacaaaagggcattaaactttttgcgatcaccgatcatggcccggatatggaagatgcgccgcatcactggcacttcattaacatgcgtatctggccgcgagtggttgatggggttgggatcctacgcggcatcgaagctaacattaaaaatgttgacggtgaaattgactgcagtggcaaaatgtttgattcgctggatctgattattgccggttttcatgagccggtgtttgcgccgcatgacaaagcgaccaatacgcaagcgatgatcgccactatcgccagcggcaatgtgcatataataagccatcccggaaatccgaaatatgaaatagatgttaaagccgttgctgaagcagccgcgaaacatcaggtggcgctggaaatcaataattcctcttttttacactcacgtaagggaagtgaagacaattgtcgtgcggtagccgcagcggtacgtgacgctggaggttgggtggcattaggctcggattctcacaccgcgtttaccatgggtgaatttgaagagtgtcttaaaatcctcgacgcggtagattttccgccagagcgcattttgaatgtttctccgcgccgcttactgaacttccttgaatctcgcggtatggcaccgattgcggaatttgcagacctttaattactagtaatggaaatatattaatgaacgagttttctatcctctgtcgtgtgctgggttcgctctattaccgccaaccgcaagatcctttactggtgccgctgtttaccctgattcgtgaggggaaactggctgcgaactggccactggagcaggatgagttactgacgcgtttacagaaaagctgtgatatggcgcaagtctctgccgattacaatgcgttgtttatcggcgatgaatgtgctgtgccgccatatcgtagcgcatgggttgagggcgcgacggaagcggaagtgcgcgcttttctttccgaacgggggatgccattagcggatacgccagccgatcacatcggcacattgctgctcgcggcttcctggctggaagatcagtcaacggaagatgagagcgaagcactggaaacactgttcagtgagtatctgttaccctggtgtggtgcgttccttggcaaagtggaggcccatgcaactacgcctttctggcgcaccatggcaccgctaacccgcgatgctattagtgcaatgtgggacgagctggaagaagattctgaagagtaaatgtgatctgcatcactcataactgcaacagataatttgttgttgcataaaatgtgtgctcgatctcattcatggccgcgttttctgctatcatgcgcggcatgaacatacttctctctattgcaatcacaacaggcattctctccggtatctggggatgggtggctgtttccctgggcttactaagctgggcgggcttcctgggctgtacggcctactttgcctgcccgcaaggtgggctgaaagggctggcgatctccgctgcaaccctgcttagtggcgtggtgtgggcgatggtcattatttacggtagtgcactggcaccacatctggaaattctcggttatgtcataaccggtattgtcgcgtttctgatgtgtattcaggccaaacagctgctgctttcatttgttccgggaacgtttataggcgcatgcgcgacgtttgccgggcagggtgactggaaactggtgttaccttcgctggcgctcgggttgatatttggttacgcaatgaaaaacagcggcctgtggctggcggcgcgtagtacgaagaccgctcaccgtgagcagcaaatcaaaaataaagcgtgaggggcactcacgctttcgcttaaacagtaaaatgccggattattaattccggcatttttatctatcaggattccggtggaaccgacatatggcggtatttcaccagaatgtcattctgccgttctgctttgttctgcaaatcccacagaccacggtcaataccatcattaatcaggaaaatgacccctgtttcgatagccgacatcaggcacagcataacgggttcgttcgaggtgtaacccacttccccttccagcaagcgctggtagtcaataaagcggaaaaccccggcctgaacttcataggaaagtatcgtcttactggtgttcaccgaggagaggatctcaccggtactcacattgacgacacgcaggttcacggcaatctgatcaagctggtattgcgtgtctgcaccgatcccaaaatatcttgccccaacaccgcccgatttaacgttgctttcataaccgataattgaaccttcaaccatgatatttgccgccgttaaagattgcagcgggattcggttattaatggcaaccgtgccgttttcttgtgccgcacgaataatcttgcgctcgttaagcagattttgtaagccctggcgctccagcggtataaaccagcgagaatctttcaatgccgtgaccagcattgccgtggcgctttgcggaacagcagtggagaagttacttgccgggtagggtttaaattgcccggtttcgtcctgaatgttgtataccgaaacaaagatcttacccgtcggcgctggcagatgggtcaaatctttgtagctctgagcacgaggcattaatgtcggtctggcggcttctttaggcggggcggttaagcatccgctcagtaacatgacggcaaccaaaagaaataagcgctgcatgattattttccttatgaagctggggcttaaaaatcggttgagttattttgtaaacccgaaacctggatggtcgaggtttgtccggttttacgatctgtcacgttcaactgcaattgaccatcgcggttagcaatatcaacaatataatcgttggtcaccatgcggcccggtttaccggtattaatattcgacagtagcccacccaaaatttgtgactggatggcctgagtaaagttatctaacgccgagggcgtttcaataccaaagtcatcgttatagctcggatctttataagagttttgggcctgagcgctatttaacaaaaaagcgccattatttgggttaccaccaaagtttggattacggaactggaaagtcatggttccagcccaacttaatggcgaaataagcatgagtagaactactgcatgtttgacacgcattgcagcctccgaacaattttttatttaaaattcatcatgcgccaaatcgcccgtacttaataacgcctggtttatctggcgacgatttagtgcttcttcagtttgaatcagtgcaaagacgacagttttctcgaagtctcttttcaacggaaataaaaaagtctggaaaataacgtcctgattcaccgttattgtgatccagcttccccatcgtgcactgggcctttcattaatcgttaagttacccgtatagtcactttcccatttatcactaaaggctcggtaaaaatcatggccaatagatgaaacagtatggtcagttaacaatcccgggacttctacctcaacggcgtgaagattccctgcggcgaacagaaattctgccgccacaatccagcgtaaataacgtttcatggctttatcgcctgaggttatcgtttgcccaggaaaccgcttgtgtccggttttttacggctatcttcttgaaaagattataaagatgcgttttaaccgtattttcgctgatgaacaacgaacgagcgatctcgttattagacgcgccgatacgcagcttattcaggatctctttttcccgatgagtaaggagggctgattccgtgctgttataacgatagttacctgaatgcgtaatcaggtaactggcaagcttttgcgtaaagtagcattcgccgcgcaggacgccttgcaacccattgacaacacgttcttgatcctccatggcataaaaaacgccgttgatatgaggccagttttcaatgtcgcggtacgggtaatcttcaggcgtatttagcaacaatattttgatattgttgtttttcctgctcaaagtatcctgccaataatggataagctttttatccgcttccatcatatccagaagaataatagagcctgaagatatatcgtccagagaacgttgaatattatgtaattttcctgtaattgccagcgattgtttaaggtgctgcaagagagctgtcgcctgcaaagaaggtttagtgatcaacaataatgtatgaccatgaatactatggacttcattaaacatgatgaaaccccgctttttttattgatcgcacacctgacagctgcctctaaaatagaagcaccagaagtactgacagatgttgcactgctgtgtgtagtaataaatcagccctaaatgggtaaaatataaaactaatggattacatctgatttcaatctagccattacaaatcttaaatcaagtgttaaacatgtaactaaatgtaactcgttatattaaaatgttaaccttaaggttttattaagtttataaatgatagaaaagttgtacatttggtttttattgcacaattttaaaaaatcatacaaatggtgctaacttactaataatgcatataaaaaatatttcgctgtagtcctttcgtcatgaaaaacgttcttgttttttctccataccaccgtggacaattttttactgcaaaaagacgaggtttgtcacggcttgtgcgcaagacatatcgcagcaatcagcgacgggcaagaagaatgactgtctggtgatttttgatagcggaaaacggagatttaaaagaaaacaaaatatttttgcgtagataacagcgtatttacgtgggttttaatactttggtatgaacaaaaaaagaaaaatacaacgtgcgggtgagttattaaaaatatttccgcagacatactttccatcgtaacgcagcgttaacaaaatacaggttgcgttaacaaccaagttgaaatgatttaatttcttaaatgtacgaccaggtccagggtgacaacatgaaaaacaaattgttatttatgatgttaacaatactgggtgcgcctgggattgcagccgcagcaggttatgatttagctaattcagaatataactttgcggtaaatgaattgagtaagtcttcatttaatcaggcagccataattggtcaagctgggactaataatagtgctcagttacggcagggaggctcaaaacttttgacggttgttgcgcaagaaggtagtagcaactgggcaaagattgatcagacaggagattataaccttgcatatattgatcaggcgggcagtgccaacgatgccagtatttcgcaaggtgcttatggtaatactgcgatgattatccagaaaggttctggtaataaagcaaatattacacagtatggtactcaaaaaacggcaattgtagtgcagagacagtcgcaaatggctattcgcgtgacacaacgttaatttccattcgacttttaaatcaatccgatgggggttttacatgaaacttttaaaagtagcagcaattgcagcaatcgtattctccggtagcgctctggcaggtgttgttcctcagtacggcggcggcggtggcaaccacggtggtggcggtaataacagcggtccgaattcagagctgaatatttaccagtacggtggcggtaactctgctcttgctctgcaagctgacgcccgtaactctgatctgaccattacccagcacggcggcggtaatggcgcagatgtgggccaaggttctgatgacagctcaatcgatctgactcagcgtggtttcggcaacagcgctactcttgatcagtggaatggtaaagattctactatgactgttaaacagttcggtggcggtaacggtgctgctgttgaccagactgcatctaactccagcgttaacgtcactcaggttggctttggtaacaacgcgaccgctcatcagtactaatacatcatcagtatgaaagaaacagggcgcaagccctgttttttttcgggagaagaatatgaatgcgttattactccttgcggcactttccagtcagataacctttaatacgacccagcaaggggatatgtacaccattattcctgaagtcactcttactcaatcttgtctgtgcagagtacaaatattgtccctgcgcgaaggcagttcagggcaaagtcagacgaagcaagaaaagaccctctcattgcctgctaatcaacccattgctttgacgaagttgagtttaaatatttccccggacgatcgggtgaaaatagttgttactgtttctgatggacagtcacttcatttatcacaacaatggctgccctcttcagaaaagtcttaatttgttgaaatatcgagcataagatgaacctggagagaatggtctgctgcgaatcagccaacctgaaagtatggataacacaaccctcaaggatgattaatcattgaggaaatagaataaatgttcagaccttttttaaactctcttatgctcggcagtttgttttttccttttattgccattgcaggaagcagcgcgcaagggggcgtgatccatttttatggccaaattgtggaaccggcatgtgacgtcagcacccagtcatcacccgtagaaatgaactgcccacagaatggttctgttccgcgtaaaacctattccagcaaagcgttaatgagcggcaatgttaaaaacgcgcaaatagcctcagtaaaagtgcagtatcttgataaacagaaaaagctggctgtaatgaacatcgaatataactaagtttctgaacaactcacgttgctgagcagaaaaatgcgatttaaccaaaaagcctgctgtacacttaggaaacaagaaggtgtaaggaggcgttatgaaaacgcgtattcatgttgtgcagggtgatattactaaactggccgttgatgtgattgtgaatgcggctaatccgtcattaatgggaggcggcggcgtcgatggggccattcatcgcgcagcgggtccggccctgctggatgcctgtttaaaagtcaggcagcagcagggcgattgccctacggggcatgccgttattacgcttgcaggcgatcttcccgctaaagccgtagtgcacaccgtcgggccagtctggcgtggtggtgaacaaaacgaagaccagcttttgcaggatgcctatctcaatagcctacgactggtggcggcaaacagctatacgtcagtggcttttcctgcaatcagtactggggtttatggttacccccgtgcggcagcggctgaaatcgcagtaaaaaccgtttcagaatttattacccgtcacgctttacccgaacaggtatactttgtctgttatgatgaagaaaacgcccacctctacgaaagactccttacccaacaaggagatgaatgatttgcctcagctggcgagcgcggtgctgccactgtgttcgcaacatcccggtcagtgtggactttttcctctggagaaaagtctggatgcgtttgccgcccggtatcgtctggctgaaatggcagagcatacactggatgttcagtattacatctggcaggacgatatgtcgggtcggttactgttttccgccctgttagccgcagcaaagcgtggcgttcgcgtacgtttgttgctggacgacaacaatacgcccggacttgataacattttacgcttgcttgacagccatccacgcattgaagtccggctttttaatcctttctcgtttcgcttgctacgtccgcttggttatatcaccgacttttcccgtctcaatcgccgtatgcacaataaaagtttcactgtcgatggcgtggtgacgctggtgggaggacgaaatattggtgatgcctattttggtgcaggggaagagccacttttttcggatttagatgtcatggcaataggacccgtggtagaggacgttgccgatgatttcgcccgctattggtattgcaaatcggtttcccccttacagcaggtgctggatgtcccggaaggtgaaatggcggatcgcatcgagttaccggcatcctggcatgacgatgccatgacgcatcgttatttacgcaaaatggaatccagtccgtttataaatcatctggttgatggaacgttgtcgcttatctgggcgaaaacacgtttattaagtgatgatccggcgaaaggggagggcaaggcaaaacggcattcactgttaccgcagcgcctgttcgatatcatgggctcacccagtgaacgcatcgatattatctcttcctattttgtaccgacacgtgcaggtgtggcgcaactcttacggatggtgagaaaaggggtaaagattgcgatcctaaccaattctcttgccgctaacgatgttgctgtcgtccatgcaggatacgcgcgctggcgcaaaaaattgctccgctatggggtggaattatatgaactcaagccgacgcgtgaacaaagtagtacgttacacgatcgcggcataaccggtaattcaggggccagcctgcatgctaaaacctttagtatcgatggtaaaacggtgtttatcggctctttcaatttcgatccgcgttcaacgttgctcaatactgaaatgggcttcgtgatagagagcgaaacgctggcacagttaattgataaacgctttattcagagccagtatgatgcggcctggcagctccgtctggacaggtggggacggatcaactgggttgatcgtcattcaaagaaagagattattctcaaaaaagaacccgccaccagtttctggaagcgggttatggtcaaactggcgtcgatattgcccgtggaatggttattgtaaacgcggcttaacgggctggtgctttatcgttctcacgcttaacaaccggtttaccagagaacaaaaacttcaataatgggatgcgtaaatgaatttcatacagaattatcgcaatccctactacgaatatcaggccacagagaaaaccaagccagttggaggtgatgtgtggtgtaatgtatgcgccgaaaaacagcgttaacgggtggtgaaccagatagataaacagcgatgcgttaacaaaataagtcacccgcgctgactggaagttaagcaaacggtggccaaaggagaagaccacattcaccatccacagaccgaggaccatagtgatcaccgactcggtttcatacatccaggcatcgccactgccatagcgctggttgagtaaataagcgacaaacgccaatgctgctgcaagggtacagccacgagacggcgtggtaaacaaggctttaagatgagggaaaatgaaagccagtgcgccgaggataaagaacggcaaataaaataacgtttgcatgacaataaaattgaacatgccgttactcagaatgggtggatacacaataaaaatcgttcttcttattaccgcataaccgatgccgaggcacaaaaaaatcaccgataattttaccatcgagaattttttattcgttttatcagaattttctaaattatttctgatgcgtttaaatatccatacgcacagcgtcgtcatgaccactaacaccagtaaaaaccacaggtgtgatattaattcccaggccaacgtattatatttgtcatacaatgacagcccaggccaactttccgctttccctttgacgtattgcagcataataaattgcggcaatgtcagtaaggggatggctgttaacatcgggatccctacacgttcgacacgtactttccaccattttttcaagggatagcgtaaaaaaagcatgtaggaaaagtacccggatataacgaaaaacacctgcatgcggaacgagtggatgaagtcattaaaaagggtcagccacaatgacggttcggcgctattcacatgccatgtatggctcgaatagattaaagaaatatgaaaagggatccctaacaacatcagccaggcgcggatagagtcgaggaaatattcacgttgcgcgggtactggattcatatatggttaactaatctcggatttttcgtcttatccctgtcgggttatgcctttaggcttgttgccatagcgacaccgacctgaccgcgccaggcgcaggcttcaaggtttttatgcatagcatcatcgctaccactaaccagaatggaagcgtctgtaagacggttgataaataaatttgctggcaaaccctacacgaagtcgatgcttctgtctttaggagaagcacggaaagtgaaaacggttgcaatcaggtgcttaatccatgagccagtgtgctgaacgataccgggattctgttgtcggaatggctggttatccattaaaatagatcggatcgatataagcacacaaagggggaagtgcttactaattatgaaacataaactacaaatgatgaaaatgcgttggttgagtgctgcagtaatgttaaccctgtatacatcttcaagctgggctttcagtattgatgatgtcgcaaagcaagctcaatccttagccgggaaaggctatgaggcgcccaaaagcaacttgccctccgttttccgcgatatgaaatacgcggactatcagcagatccagtttaatcatgacaaagcgtactggaacaatctgaagaccccattcaaactcgagttctaccatcagggtatgtacttcgataccccggtcaaaataaatgaagtgactgccaccgcagtcaaacgaatcaaatacagcccggattatttcactttcggcgatgttcagcatgacaaagacacggtaaaagaccttggttttgccggtttcaaagtgctttacccgatcaacagcaaagataaaaacgatgaaatcgtcagcatgctcggggccagctatttccgcgtgattggtgcaggtcaggtttatggcctttctgcacgcggcctggcaattgataccgccttgccatcgggtgaagaatttccacgcttcaaagagttctggatcgagcgtccaaaaccgactgataaacgtttaaccatttatgcattgcttgactcgccgcgcgcgacaggtgcttacaaattcgtagttatgccaggacgtgacacggttgtggatgtgcagtcgaaaatctatctgcgcgataaagtcggcaaactgggggttgcaccgttaaccagtatgttcctgtttgggccgaaccaaccgtcgcctgcaaataactatcgtccggagttgcacgactctaacggtctgtctatccatgctggtaatggcgaatggatctggcgtccgttgaataacccgaaacatttagcggtcagcagcttctcgatggaaaacccgcaaggcttcggtctattgcagcgtggtcgtgatttctcccgctttgaagatctcgatgatcgttacgatcttcgtccaagcgcatgggtgactccgaaaggggagtggggcaaaggcagcgttgagctggtggaaattccaaccaacgatgaaaccaacgataacatcgtcgcttactggacgccggatcagttgccggagccgggtaaagagatgaactttaaatacaccatcaccttcagccgtgatgaagacaaactgcatgcgccagataacgcatgggtgcaacaaacgcgtcgttcaacgggggatgtgaagcagtcgaacctgattcgccagcctgacggtactatcgcctttgtggtcgattttaccggcgctgagatgaaaaaactgccagaggataccccggtcacagcgcaaaccagcattggtgataatggtgagatagttgaaagcacggtgcgctataacccggttaccaaaggttggcgtctggtgatgcgtgtgaaagtgaaagatgccaagaaaaccactgaaatgcgtgctgcgctggtgaatgccgatcagacgttgagtgaaacctggagctaccagttacctgccaatgaataagacaactgagtacattgacgcaatgcccatcgccgcaagcgagaaagcggcattgccgaagactgatatccgcgccgttcatcaggcgctggatgccgaacaccgcacctgggcgcgggaggatgactccccgcaaggctcggtaaaggcgcgtctggaacaagcctggccagattcacttgctgatggacagttaatcaaagacgacgaagggcgcgatcagctaaaggcgatgccagaagcaaaacgctcctcgatgtttcccgacccgtggcgtaccaacccggtaggccgtttctgggatcgcctgcgtggacgcgatgtgacgccgcgctatctggctcgtttgaccaaagaagagcaggagagcgagcaaaagtggcgtactgtcggtaccatccgccgttacattctgttgatcctgacgctcgcgcaaactgttgtcgcgacctggtatatgaagaccattcttccttatcaggggtgggcgctgattaatcctatggatatggttggtcaggatgtgtgggtttcctttatgcagcttctgccttatatgctgcaaaccggtatcctgatcctctttgcggtactgttctgttgggtgtccgccggattctggacggcgttgatgggcttcctgcaactgcttattggtcgcgataaatacagtatatctgcgtcaacagttggcgatgaaccattaaacccggagcatcgcacggcgttgatcatgcctatctgtaacgaagacgtgaaccgtgtttttgctggcttgcgtgcaacgtgggaatcagtaaaagccaccgggaatgccaaacactttgatgtctacattctgagtgacagttataacccggatatctgcgtcgcagagcaaaaagcctggatggagcttatcgctgaagtcggtggcgaaggtcagattttctatcgccgccgccgccgtcgcgtgaagcgtaaaagcggtaatatcgatgacttctgccgtcgttggggcagccagtacagctacatggtggtgctggatgctgactcggtaatgaccggtgattgtttgtgcggcctggtgcgcctgatggaagccaacccgaacgccgggatcattcagtcgtcaccgaaagcgtccggcatggatacgctgtatgcgcgctgccagcagttcgcgacccgcgtgtatgggccactgtttacagccggtttgcacttctggcaacttggcgagtcgcactactgggggcataacgcgattatccgcgtgaaaccgtttatcgagcactgtgcactggctccgctgccgggcgaaggttcttttgccggttcaatcctgtcacatgacttcgtggaagcggcgttgatgcgccgtgcaggttggggggtctggattgcttacgatctcccgggttcttatgaagaattgccgcctaacttgcttgatgagctaaaacgtgaccgccgctggtgccacggtaacctgatgaacttccgtctgttcctggtgaagggtatgcacccggttcaccgtgcggtgttcctgacgggcgtgatgtcttatctctccgctccgctgtggtttatgttcctcgcgctctctactgcattgcaggtagtacatgcgttgaccgaaccgcaatacttcctgcaaccacggcagttgttcccggtatggccgcagtggcgtcctgagctggcgattgcactttttgcttcgaccatggtgctgttgttcctgccgaagctattgagcattttgcttatctggtgcaaaggaacgaaagaatacggcggcttctggcgcgttacattatcgttgctgctggaagtgctgttttccgtgctgctggctcccgtacgcatgttgttccatacggtcttcgtcgtcagcgcgttccttggctgggaagtggtgtggaattcaccgcagcgtgatgatgactccacttcctggggtgaagcgttcaaacgccacggctcacagctgctgttagggttagtgtgggcagttggtatggcgtggttggatctgcgttttctgttctggctggcaccgattgtcttctcgttgatcctgtcaccgtttgtttcggtgatttccagccgtgccaccgttggtctgcgaaccaaacgctggaaactgttcctgatcccggaagagtattcaccgccgcaggtgctggttgataccgatcggttccttgagatgaatcgtcaacgctcccttgatgatggttttatgcacgcggtgtttaacccgtcatttaacgctctggcaaccgcaatggcgaccgcgcgtcaccgcgccagcaaggtgctggaaatcgcccgtgaccgccacgttgaacaggcgctgaacgagacgccagagaagctgaatcgcgatcgtcgcctggtgctgctaagcgatccggtgacgatggcccgtctgcatttccgcgtctggaattccccggagagatattcctcatgggtgagttattacgaagggataaagctcaatccactggcattacgtaaaccggatgcggcttcgcaataaaaacgtagttgcctgatgcgctacgcttatcaggcctacatcgttcctgcaatttattgattttgcaagattttgtaggtcgggtaaagcgttcacgccgcatccggcaaaaacaacgagccaataaaaataccggcgttatgccggtattttttacggaagaggtatcaaatgcgtttaattgtgatgagcataatggtgaccttgctgagtggctgtggcagcatcattagtcgcactttaccggggcaggggcatggcaaccaatattatcccggtgtgcaatgggacgtgcgtgactccgcctggcgttacgtcacgatccttgatctgccattctccctggttttcgatactttactgctgccgatcgacatacatcatggcccgtatgagtgattaacgttcatcccactcatcagctgcagtgcgtccttcctcggtatccagcggtggctcaagctgaaattccccctcgtcccattcatgtaatgtattctcatcttgccactcctggcggatctcaatctcatcatagtcgccgtcaaagacactttgcgcagcttcaccgctaagcatgggtaaacattcaccttcttccccttcgtcggcaaaaaactcaacttgccacatgatgtcgccgtcctgcaaaacgtatttttgggcattgaactgttgcacattcgcgttttcggcgtcgatgccggggttgtctgcaagaaattcttcgcgtgcagcgtcaatggcttcttcaagcgttgcgtacatggtcatcacgattctccctttgagttgatgaggtttcagggaaaaggatagctgattctccgcttttgcaagtatgaaaggcgaaaaatcagttcgatatctgggggattcgacgacgacgtagactgttccatgaatagactgcgttgaataacactacgccagcggtgacgagaaataccgccctgaaaccgtagttcgctgaaatcgctgctcccatcaatggtccggtaacgttgccaatatcacgaaacgattggttatagctgaagatacgcccggcgatctggttgctcgagttataaactaatagtgtctgtacggcggggagtagtgcaccatcggcggcaccgagcaaaaaacgtaaaatcccaagttgtaatggcgtctgaacgtaagacattgggatcaacagcagtacagaaaagatcagcgccgtaatcaggatcttttcggggccgattcgatcgccaagtttgccgagtcgtggtgcacttagcagagccgccacgcctggcaccgaggcgatcatgccactgataaaggcgacgttactgacgttacccgccagttcgcggacatacagcgtcagaatgggggcaattgagcccgtcgccacctggatgattaacgtggtgacaaacaggctgagtaccagtttcgggtttttaagtgatgtcaccacttcccgcatatgcagcatctcttttttgctgaccggctggaatttttctctgatgcaaaacagggtgacgaaaaagcagagtatgagcacactggcggtaataaagaataccggacgtaagccgtagctatcggcgagcaaaccgccagccattgggccgagcaacgcgccgctaacgccgcctgtggagagcgtacccagcgcccagccgcttttattacgcggtacttgtgtggcgataagagcattagcgttggggacaaatccgccaagtaaaccaagaagcgcccgcaggatcaaaaactgccagatattttgtgccagtcccatcaacaccatcacgatgcccatgccgagagcagagcgtaatagcatgatttttcggcctttacggtcggcgagtccaccccaaaacggtgaggcgatggccgaaaataaaaatgtaatgctgaagacaataccggaccacatattcagggcggagtggccggtaacgccaagctgctcaacgtagaggggtaagaagggcattaccaggctgaaggcggcaccggtaagaaaacagcctagccaggcgacgatcaggtttcgtttccagtttataggggtgtcattttcacagggtgacatagcaatccgctgttggtgcgccaggcgcggtgaacataagaagaaaagataagcacactaattatgcgcccgacttccagggggcgcaatccagagagcttttatcgctaaatcagggggattttctgtggtaatgccggatgccattctgaagcatccagcatggaagatttaatagcgtgaaggaacgccttccgggcgtgttttaaagcgacggtgtaaccacatatactgctctggtgccatcatgatgcatttttcgaccactttgttcatccacgcggcggtagtttcggcatcatccagcggcggagaacactctggcggcagtataatcaactgataccctttgccatctggcttacggcgtggaacgaagggcaccagacatgcgccggacatccgtgccagcatccaggttccggtcgtggtcgcagcctgctcaacggcaaacaacgggacgaaaacgcttgagcgcgggccgtaatcatgatccggtgcgtaccagaccacttcgccttttttcagggctttaatcatgccttttaaatctttgcggtcgagcatcgatttatttgagcgcaaacggccccaggtttgtagccagtcaatcagtggattatcgttcgggcggtaaacgccaatccccggttcctgcataccaaactgccgcgcacccagctccagtgtcagaaaatggatgccaactaacaggatgccgcgtttttgcgcctgcacgtcacgaatgtgttccatgccgatcacttccgtccagcgggcgattcggcggtccggccagaaccacgccatgccggtttccatcaggcccatgccaacggattcgaaattcttcaccaccattttacggcgttcttgttcgctcatttccgggaagcacagttccaggttgcgatgcacaatttttgcgcgtcgtttcataaaacgtaacgccagttttcctaatccacaaccgaggcggtagataaccgggtagggcaattgcacgaccaaccaaagtacgccaatacccaaccaggttaaccaataacgcggatgaagcagtgcggtggagaacttgggtagattcgtcatatcaatcctgtttttcaacctatacgggcaattgtatgtattgtcgcattttttcgtccgcaaccaaaatttgtgactgaagactgggcgaaattgccgcgcttgtaaataacaaataatttttaatgctaaaatgtagcgtaaaatgtgtggatgttaattatcgataattgctatatcatgccgcggatttttactttcccatctcgcaggaaccgtacaccatgccagtgttacacaaccgcatttccaacgacgcgttaaaagccaaaatgttggctgagagcgaaccgcgaaccaccatttcgttttataagtatttccacattgccgatcctaaggtgacccgtgacgctttatatcaactgtttaccgcgctgaatgtttttgggcgagtgtatctggcgcatgagggcattaacgcgcaaatcagcgtacctgcgagcaatgttgaaacatttcgcgcgcagctctatgccttcgacccggctttagagggtttacgcctgaatatcgcgttggatgatgacgggaaatccttctgggtactgcgtatgaaggtacgcgatcgcattgttgccgacggtattgacgatcctcactttgatgccagcaatgttggtgagtatctgcaagcagcggaagtgaacgccatgcttgacgatcccgatgcattgtttatcgacatgcgtaaccactatgagtatgaagtggggcactttgaaaacgcgctggaaataccggcagataccttccgtgagcagctgccaaaagcagttgagatgatgcaggcacataaagataaaaaaatcgtcatgtactgcaccggcggcattcgttgtgaaaaggccagtgcctggatgaaacataacggattcaacaaagtctggcatatcgagggcggaattattgaatacgcccgtaaggcgcgcgatcagggcttgccggtgcgttttattggcaaaaattttgtttttgacgagcggatgggcgaacgtatatctgatgagattatcgcgcactgccaccagtgcggtgcgccgtgcgacagccataccaactgtaaaaatgatggctgccatctgctgtttattcagtgtccagtatgtgcggaaaaatacaaaggttgttgtagtgagatttgctgcgaagaaagcgcgttaccgccagatgaacagcgacgtcgtcgggcaggacgtgaaaatggcaataagatctttaataagtctcgtggacgtctgaatacaacactgggcattcctgatccaacagaataaatatcattgccggatgcgtgccatccggcaacatttcactcttacttctgctgtacgccttccactgaaataatcagatccacttcctgagacgctggacctaaatctgtcttgatattgaagtctttgagcttaattttgccttcggcctcaaagcctgcacgtttaccgccccacgggtcgtcaccctgaccaattaatttcgcttccagtgtgacgggcttggttacaccattcagcgtcagatcgccggtaatatccagttcgtcaccgtctttcttcacgctggtggaggtgaatgttgcctgtggatattttgcggtattgaggaaatccgcactgcgaagatgtttatcgcgttcggtgtgattagtatcgacgctggtggtgttaattgtcacattcactttatcggcagctggatttttttcatcaaaggtaaaagtaccgtcgaaatctttaaaggtgccatataaccagctatagccaagatgctggatgcggaagttaacaaaggcgtgctgaccttctttgtcaattttgtaatcggcggcaaccgctgaaccggcagagaacatcaaggaagcgaaggttaaaccaagcaggctttttttcattttttatactccatagtcagatgacgactttcccagcatgcgcttcagagtgtcgtctttatcgatgaaatgatgcttcagggccataaatccgtgcataacggacagtactacaacgctccacgcgagccaaaaatgcagggcaccggcaaagtcagcctgtgcgccagcgtcggagaggatcgcggggacgtcaaaccagccaaaaacgctgatcggtttaccatcggcagttgagatcagatagccgctgatgccgatggcgaacagcaataggtacaatgcgagatgtccagcttttgctgcaagacgagtcatgggcgaataactcggcagcggacccggcggtggagatatgacacgccacagaacgcgaataaccagccccatcattaacaaaatgccgatgcttttatgcagttccggtgcctggtgataccagccatcgtaataactgagcgtgaccatccacagacctaaagcaaacatgccatagacaataattgcgcttagccaatgtaaggccgcagatataacaccatagcgttcaggggtatttgtgaatgacataagtgcatccaaaacgaatttgcgagagaaagaaaatggcgtgtcggagaatgaattgcaacacaaaaataacaaattgaatgatatttatttttatttcaataattttgaattaataatgaaagaatcttcataagtttagtgggttcagcatctggaaggtctagtgagtgctgtagaggcaggaagaatctcattcaatttttcacgctaaatgaaagggagattaaatatttgtcagtttatgtcagtgcggaaaaactaaaaataaaacacgtagattaggtccataattgctaatagtccccagagaaaaagataaagcatcagatgctcgcgaatattaatgagatagttcaccaaccgacgcattaaatacccctgtaaaaacggcctcattctggaggccgtaatgatgattattggaagcgggaaagcctgaatggcgtcaaatcaaaatcgctttttttgtcttgcgcaaaatcggcagctatttcccctaaaactgacgcaaatttaaaaccgtgcccactcaggccggtaataagcagggtattatcgtgggcgggtaaggtatcgataataaaatcctcgtcaggcgaattatcataggtgcaggcagcgccgtacaggcagcagccgatacccggcaacacattgcgcaagaacgggaaggcttccgaaccatcgctgaccacttccgcaaacggaacacgttcatccgctgaatggataacctggcctccgttatgtttgccaatcttcaacgcgtcgttttctgccggaaaaccataatattgatcgccattgggcagttcaccggtaaacgccgggaatttattcttcacgctatagcgaccatcggcctgataccaggcaaatactttgcgtacgggctggacaggcagctccgggagtaggtcttttacccatgttcccgcgcagacaatcgcttttttcgcctgatactcaccgtcagccgtttcaatagttacgccatcatcgtcatgacgaattgcggtgaccgggcagttgaacagctgcgcacagcccgcttccttcgccagttggatccaggttttaatcgccagttcgctgcgcaaaaaaccggaatcagtttcaaataaaccgatgtagttgtccgggacgcgtatttctggccagcgggccataatcccttgcgcgtcgagcttttcaacgttgagttgccactgttcggcgctgtgggcgacgttggcgagaaatgcggagtcagccggaccgaggttaatgacaccagagcgtacaaaaatgggatcatcttcgttgtggcgggaaagttcatcccacagcatttgcgcgcggaggaccagcgggacatacttttcgccttcaccataagcatggcgaattaatcgcgtatcgccgtggtggctgccgtgttgatgcggtggcatatgggcgtcggtcattagcacgtttaaaccggcgcgggttgcataatacccggcggcagcgcctacggaaccgctgccaataatgatgagatcgtatttcatttttttctctctgctctcatggtttaagcagagtaattaactgaatgcagatatacaacccagaaatggtaaaggcaccggtgaggtgccttttgggtggatggtcatgtcatgttaatgacgccgatactcgtttacctggaaatcaccggattcaattttggcgattcctgcttctaatatcgaaataaattgtctggcaacatcagtggttaaccagagcgtctgaccaacttcagtcccttcctgctcggacttatttggggtctggtagtgcaaacgcaacatcagcgcatcatagctatcaacggtgctgatgtcccaccctacgagcggatgagtctgaatgacttcattatttttttccatcatggccccctaattcgtgttactagacaacgttattcgaggttcaatgcgtttttatctgaagcaacttcagtataccaataagtaagggtattcaccgaatttttaaaggggggagcagataaatttctgcttttaagatttatatgaacaataaaacagcatgtcattcatatttttttagcatattgtgcaattattttgaggaagtgtagaaattttgtactcacaattcgcaagtaaaataaaaaagccggggcgacccggcaaaaacaaaaatcactgcatattattcgctgacaaaccagtcatcggcgctttcccacgtttcctggagaatttcgctaatgcgctgtttatcttcttttgtcgcgccaataaccgataaattatttgctgcggcataacgtaccgatacgtggccttcattatcaggaaacgcatactgaatacggcgggaaagttcgccagccagggcgtcaatagccccagctggcaatggagaagttttcgctatggtgacttcaattcgcataatagccccctgttgaatatactggttatttatacaggtaaaataacctaatgacaacaggaagctacgatttttattgtttaacggaccagcgtaccgtttctccggcgaggaatggcaccagcgtgtcatcagtcagtgcgatgctttcagcaacctgttgctcttcacgtaccagttcgatgaatgtgtcgttgaccggcaagccatagaactgcgggccgtttacagaacagaatgcttcaaagtgctgcaaagcattcatctcttcaaagacggtagcgtaactgcccagcgcggttggggcgttgaaacagcccgcgcagccgcagctgctctctttgcgatgacgtgcatgtggcgcagaatccgttccgaggaatacacgattaaaaccgctggcgaccagttcacgcaatgcctgttggtggatattgcgtttgaggatgggtagacaatacaggtgcggacgcacgccaccaaccagcatatggttgcggttaaacatcagatgctgcggagtgatggtggcagccagccgttcatttccgtcacggacatagtcggcagcgtctttggtggtgatgtgctcaaaaacgactttcagtgcagtcaggcgctggcgcagcggttccatcacgctttctataaagcgcgcttcacgatcaaaaatgtcgatatctgcatgtgttacttcaccatgcaccagtagcggcataccgattttttccatgcgctcaagtaccggcatgattgcgtcaactgacgtaacgccgtggctggagttagtggttgcgtttgccggataaagttttgcagcggtgaacacgccttcgttaaatccgcgctccagctcattaggatccagcgaatctgttaaataacaggtcatcagcggggtgaaatcgtgcccggcaggtacggcgtcaagaatgcgctggcgatacgccacggcagcctcaacggtggtcacgggcggagccagattgggcattacgatagcccgtccataaatttcgctggtatacggcacgacagtttttaacatgtcgccatcgcggaggtgaaggtgccagtcgtctgggcagcggatctttaatacctgggatggtgcagtcattaatctctatgctccggctgaagggatgtttttgccggacacaaaggataagcggaaacgttttcctttgcacgaaaaataaagggcgcgaatgcgccctcgtgattaatcagtaaacggaatgacaatttcgcctggcttcacttcaatgcctttcgccagtttcttcgccattgcttcgccctggctgccatcttcgcgcaggacgtaagcaggttgctggttaaagtaattgcgtaatgcctggtttaaatagggaagcaacgtttgcatcaccgtttgcatttttcccggttgtaccgtcgcatcgaccacttccatctctttcaggaagatcgcgcctttttctttatcaaacacgggcagcgctttcagcttcagtttcatggtcgctttctggctaccgaacagggagttcatgtccagattggcgtctccggttagggtaaccttattcggctcttcgcgaccaatttggctggtcaggtttgtcagaacaatatgggcgtcagccacgccgggtaaaccgatatcttttgagaaattattatgtttcgcaagcgactggttaatttcttgttcggtgatggtgtattgggtgagttgattacagccaacgagcaggccactgacgatcaatgcagcggcaaataaaaacttgttcatggtagtcctcgacatgaaatctgcgtcaatatcctgacacaacgcagcatgtgtcaccagcgataaacgcgccagcagaaaaaactgaaaacggcggcaacccgcgaatacaggctgccgcggcgggtcaggattaaatcgccattgatgataacaaattgatttgtgtctgtttcgccatattatcgcggtaatcagcaacgcggcttggccagttgattccggctactagcgtcagattacgcaggagcggaaatagctgaatatcatcttccgaaagttcgccattcacggcgttcggtttgacgatcagtttgtccagcgcacgtaaatcatcgctgatattcttaatcagaccgtcagagtgggccagcaggtcggcaaaattacccgcgctggcctctttcttgtcgacgaaatatttgcgcgcggcaggagtagaaaactcatcaaatgccgatttggcaaaacgcggcaacagcagtttgttggcgtagccattgaccttgcgcagccactcttcaatggcaggggaacgtttgccggtcagtaacggtttgccgtcgagtttatcgacatagtgaacgatgtccatgctttctggcatatagcggctgtcatctttttgcagaatgggaacctgtttttgaccgaccatccgggtgggtgtttctgcgtcgtcgttgagcagaacatgtaattcgacggggatatttttcaggccgaaaatcatgcgggctttgaggcagtaagggcagtgatcgtaaatgtatagcttcacgtgactcctccatttggctatcagttcactttcagtatggaggagtcaggggggagtatcaaatcaggcgtcgcgttcaagcaaacgacgcgcggcgcgtttctggctaaactgccaacccagcgcaaggaaagtgaagatgccaataatgcccagcatcatccacggaagctctggctggtgcgccgatttgcccagatcaaacagccagccgccaccgatataaccaatagcgccgccaatcgccagacccagacggctaaaccccatatagctgccgcgagctcttgcgtctgccagcgaagcacttaaggtttcacgcgcaggctcggcaatgatcgacccgatataaaacagacaaatcagggtgaaaagttgttgcaggccgctgaccatgcccactggcatcatgcttaatgacattatcaacagcccagccattaaccggtgttccagacgaaaatgcttttcactccagcgggcgatagggtagagcaacgttaacgacagacacgcttcaatggcatacatccatttaacggcagagggcgcgccagccacgtcgttgaccataattggcagcatcagcatcacttgtacagccagcatgtagtaacccgccagcgtcaggacataggtgacaaaacgcttgtcgcgcatcacgcgggtcatgccttcgcgaacgggcgtgcgcacggtggagagtttccatgccggtaacaaccacgcattgaacgctgcacacagcacaaacaaaactgcccctgtggcgcagaccaggcgaaagtcgtattgcaacagccagctccccaacaatgcgccaatgaccgcaccggcactgtcctgcatcatcaacagcgagaaaaaacgaccacgctgctgtggacggattaatttcaccaccagcgccgaacgcggaggatcaaacaacgtgccgccgagtcccgaaagcaggcatgaaaaccacagtagccacggttcgtgggcgatacccattgtggcgaatccggcggcacgcatcagcataccggtgacaatcatcggtttggcaccaaagcggtcggcaattgcgccgccgaaaatacccagaccttgctgaataaactggcgtagaccgagggcaataccgaccatgacggcggcccagcccatttgatcaacgaagcggatagagatcagcgggaagacaacaaagaaccccagcacgaccagcatattatcgatgagcaggaaatatttacccaggttcctcgcctgcgacacgcgggacatttcccctcccgggaaataaaagatgagcactttctattctgcattgccgctaagacttttcccatcacttcggggacaatatttttttatcaaaacgtcgctttgatagagagtttttatcaaatatgtgaataatgcagaaaatggcattctggacttttcacagggtctggttgcgcaggtatagtaatacttacagcgtattaaagacgttacgggaaggagtaggtatagaatgtttggctatcgcagtaacgtgccaaaagtgcgcttaaccacagaccgactggtcgtgcgtctggtgcatgatcgtgatgcctggcgtctggcggattattacgcagagaatcgccatttcctcaagccctgggagccagtgcgcgacgaaagccactgttatccatcaggctggcaggccaggctagggatgattaacgaatttcataaacaaggttcagctttctactttggcttattcgacccggacgaaaaagagattattggcgttgccaatttttccaatgttgttcgcggctcttttcatgcctgctatctcggttattcgattgggcaaaaatggcagggcaaaggactcatgtttgaagctctgagcgcagccattcgttatatgcagcgcacccaacatattcatcgcattatggctaattatatgccgcacaataaacgcagcggtgatttactggcgcgactgggttttgaaaaagaaggctatgcgaaagactatctgttgattgatggacaatggcgcgatcacgtactgacggcattaactaccccagactggacgcccggccgctaaggagaatctcatgaaatatcaacttactgccctggaagctcgcgtgattggttgcttgctggaaaaacaggtgaccacgccggagcaatacccgctctcagtcaatggtgtagtcacggcctgtaatcagaaaacgaaccgtgaaccggtcatgaatctgagtgaatccgaggtgcaggagcaactggataatctggtcaaacgccattatctgcgcacggtgagtggctttggtaatcgggtcaccaaatatgaacaacgtttttgtaattcagaatttggcgatctgaaactgagcgccgcagaagtggcgttaatcaccacgttgttattgcgtggtgcccagacgccgggtgaactgcgcagccgcgccgcgcgaatgtatgaattcagcgatatggcggaagtggagtcgacgctggaacaactggcaaatcgcgaagatggtccttttgtggtgcgtctggcccgcgaaccgggtaaacgtgaaagccgctacatgcatcttttcagtggtgaggttgaagatcagccggcggtgatggatatgtcgaacgcggttgacggtgatttacaggcacgcgtcgaagccctggaaatcgaagtggcagaactgaaacagcgtcttgattcgttgctggcccatctgggagattaaagtgaaaaaattacgtatcggcgtagtggggttaggcggcatcgcgcaaaaagcgtggttaccggtgctggcggcagcgtctgactggacgttacaaggtgcgtggtcgcctacgcgcgccaaagccttgccaatttgtgacagctggcgcattccttatgctgattcgttatccagccttgccgccagttgcgatgcggtttttgtgcattccagcaccgccagccactttgacgtggtcagtacgttactcaatgcgggggtacatgtctgtgtcgataaaccgctggcagaaaatctgcgcgatgctgaacggctggtggaactggcggcgcggaaaaaactaacagttgatggtcggttttaaccgtcgtttccgcaccactctacggtgagttaaaaacgcaactcgccaccgcagcctcgctaagaatggataaacatccgtagcaatagcgtcgggccacacgatctttatttcacgttgctggatgattatctgcatgtggtggataccgcgctgtggttgtcgggcggcaaagcctctctggatggcggtacgctactgactaacgacgctggcgaaatgctgtttgccgagcaccatttttcggccggtcctttgcagatcaccacctgtatgcatcgccgtgccggaagccagcgtgaaaccgtgcaggccgtgactgacggtgcgctcatcgacattacggatatgcgcgaatggcgtgaggagcgtgggcagggtgtagtgaataaaccgattcctggttggcagagtacgcttgagcaacgtggatttgtcggctgtgcgcggcacttcattgaatgcgtgcaaaatcagacagttccgcaaaccgccggcgaacaggcagtgctggcgcaacgtatcgttgacaagatctggcgcgatgcgatgagtgaataaaccctgtaacatctggcggtagcaattcaccataatccaggtagactattcgcctctttcagcgcctgccttgcaggcgttttgcccgtgggtctggattagaacaccgatgaatttattaaaatcgctggccgccgtcagctcgatgaccatgttttcgcgtgtgcttggcttcgcacgtgacgcaattgtcgccagaatctttggcgcagggatggcaaccgacgcctttttcgtcgcttttaaacttcctaacttgttacgccgtatctttgccgaaggggcattttcccaggcatttgtaccgattctggcggaatataaaagtaagcagggtgaagacgccacgcgggtctttgtctcttatgtttctggcctgctgacacttgcgctggcggttgtgacggtcgctggcatgctcgccgcaccgtgggtgatcatggtgaccgcgccaggcttcgctgacacagctgacaaatttgccctgaccagccagctactaaagattacctttccctatatcttgctgatctccctggcgtcgctggtgggagcgattctgaatacgtggaaccgcttctcgattccggcgtttgctccaacactgcttaacatcagcatgattggtttcgcgctgtttgccgcaccgtactttaacccaccggtgctggcgctggcgtgggctgttacggtcggcggcatcctgcagctggtgtatcagctacctcatctgaagaagatcggcatgctggttttgccacgcattaacttccacgatgccggagcaatgcgtgtggtgaaacagatgggaccggcaatccttggcgtctctgtgagccagatctccttaatcatcaacaccatttttgcctcgtttcttgcttccggttcggtgtcgtggatgtattacgccgaccgcttaatggagtttccgtccggtgtgctgggcgtggcgcttggcaccattttgctaccgtcgctgtcgaaaagttttgccagtggcaatcatgatgaatacaaccgtttgatggactgggggctgcgtctttgtttcctgttggcgctgccgagtgcggttgcgttgggcattctttccggtccgttaaccgtttcgctgttccagtacggtaaatttaccgcctttgatgcgctgatgacccagcgggcgttaattgcctactcggtgggtttgattggcctgattgtagtgaaagtgttggctcctggcttttattcccgccaggacattaaaacgccagtgaaaattgccatcgttacgctgattttaacgcaattgatgaacctggcgtttattggtccgttgaaacatgccgggctgtcactttctattggtctggcggcgtgtctgaatgcttcgctgctttactggcagttgcgtaagcagaaaatctttaccccgcaacccggctggatggcgtttctgttgcgtctggtggtggcggtactggtgatgtctggcgtgcttttaggtatgttacatatcatgccggagtggtcattgggtaccatgccctggcgtttactgcgtttaatggcggtcgtgctggcggggattgccgcgtacttcgctgcactggcggtactgggcttcaaagttaaagaatttgcccgccggacggtgtaacgatacattccggcctgcagtgcaggccggagttaatcttcagatcgaaatctttttactgccgcgatgggttgttgaggtctgaccgttcgccccatacagcgtcggttcctgatgcggtttcaacatttccagcgcctgttgattgcgttcaatctgtccttccagtaaccagccgttatgttgattcatttggcgtagttgctgcgttttcacagtaatttcctgccagcgttgactaatatcaacgctatttgctgaattgggttctttcctgcgtaactgttcgaggtaatccagcgtcgccagcagagagcttttttgttctgtaatccattgcaactggctgccgttgatctgccccatagagagatgttgctgctcttgatccattaccgttttgagatcgttaagcacagcggacatctggtcgaggatctctgcaagacgcgtcatacgatcagttactctgcaagtcttgctgcgcttcgttgatcagcgcatcggcaattttgccggtgtccatttttagttcaccgttacgaatcgccagctttaacgcttcgacacgttcaagattgatatcactgctgccgggttgcatcagttttgcttgcgcgtcgcttaacgtcacactggtgctggtggaggcggttgtttttgccgcccgggtgtttgttaccggcgcgtcagtggtttcgcgcggttgaacggtgcttacgggcttcagaggcgaagtgcgatcaatactcatggtttattcctcattgagggcgcttttatcatgtgttgcttatttatcggcaagggatgggttatctttaacagcttacaggtttataagaatattcccatctgcatcaacaacgccgctgaccacctgtcccgataccatgcgcacccgcgcattctgtgcgacggcagcattgttcagcgcctgaccttctgcgttggcgctaaccccataaccgctggcgatcacgttgacgcgttgtcccgcttttacccgccatgcctggcgaaactgggttaactggataggttgatcgggtgatagatcgcgcaggctaacggcatcaacaagttgattgatatccagcaccgtacgcggtggcagggtgtccagccgtccgcgtttcagtttgacattgccagcttccagcttttctccccgcacaatgggcattgcggcaaccacataatttcctgtggcctgcacattaacctgtaaatatcgtttgtcgttaccgcagcgtgccaacacattcacattgccccacaggcgggaattattgctcatcgaaagcaatggctgctcgcacggcggcagtagattgggcgctgtacgaatagaaacacgaacctcatcacttacccccgcgagctgggcgctaaaaaaggtgtgcaattgcgatgtgagattgctcgccgcacttaacggactgaacagtatcgcgatgatcgccacgcgacgttttattgccagcattttcgccccccagccatttctacaacgtgaattgtacctgtccgcaatgaccatcaacggcataaatagcgacccattttgcgtttattccgccgataacgcgcgcgtaaaggcatttaagctgatggcagaattttgatacctgcggaggagatatgctcgataagctcgacgccgccttacgttttcaacaagaggcgctcaatctgcgcgcccagcgtcaggaagtgctggcagcaaacatcgccaatgccgatacccctggttatcaggctcgcgatatcgattttgccagtgaacttaaaaaagtcatgcaacgtggacgggatgcaacaagtgtggttgcactgacgatgacctcaacgcaacacattccggcgcaggcgctgacgcctcctaccgcagaactgcaataccgtattccggaccagccttcgcttgacggtaataccgtcgatatggatcgcgaacgcacccagtttgccgataacagcctgcaataccagatgagccttagcgcgttgagcgggcagatcaaaggcatgatgaacgttttacagagcggaaattaacggatggcactgctgaatatttttgatatcgccgggtcggcgttaactgcccagtcccagcgcctgaacgtggcggccagtaatctggcgaatgctgatagcgtgaccggtcccgatggacagccatatcgggcaaaacaggtggtattccaggttaacgctgcgccaggtgctgcgacaggcggcgtaaaggttgccgatgttatagaaagtcaggctccggacaaactggtttatgaaccgggtaatccgctggcggatgcaaagggctacgtgaaaatgccaaacgttgatgtcgtcggggagatggttaacaccatgtcggcgtcacgcagttatcaggccaatgttgaagtgctcaacacggtgaaaagcatgatgctgaaaacccttacgctcggtcaataaaggagaaagctatgtctattgcggtaaccaccaccgatccgacgaataccggcgtcagtaccaccagcagtagttcgctcacgggcagcaacgccgcagatttacaaagcagttttctgactttgttggtggcgcagctgaaaaaccaggacccgaccaatccaatggaaaacaacgagctgacgtcgcaattggcacaaatcagcacggtcagtgggattgaaaaactcaataccacgctcggatctatttccggacagattgataacagccagtcgttacaggccagtaacctgattggtcacggcgtgatgatccccggtaccactgttcttgcgggaaccggcagtgaagaaggggctgtgaccacgaccacgccgtttggtgttgagttgcaacaggcagcagacaaagtgacggccaccatcaccgataaaaacggcgcggtcgtccgtaccattgatatcggtgaactgactgccggagtccacagtttcacctgggacggtacgttgactgacggcagcactgcgacgaacggttcttacaatgtagcgattagcgccagtaacggtggtacacaactggttgcccaaccgctgcagtttgctctggtgcagggggtgatccgcggcaacaacggtaatacgctggatctcggcacttacggcaccactatcctcgacgaagtacggcagataatttaagccttcacatttcaggagtcagtcatggccttttctcaagcggttagcggattaaacgctgccgccaccaacctcgatgttattggcaacaatatcgccaactccgccacctacggctttaaatcaggcacggcctcttttgccgatatgtttgccggttcgaaagtgggactgggggtaaaagttgctggtatcactcaggactttaccgatggcacgaccaccaacaccgggcgtggtctggacgttgctatcagccagaacggttttttccgtctggtagacagcaacggttcggtattctacagccgtaacggacaatttaagctggatgaaaaccgtaacctggtgaatatgcaaggtttacagctgacggggtacccggcaaccggtacgccgccgactattcagcaaggggcgaatccgaccaatatttcgatcccgaataccctgatggcagcgaaaactaccaccacggcgtcgatgcagatcaacctgaattccagtgattcgcttccctctgttaacgcatttgatgccagcaatgcggatagctataacaaaaaaggttcggtgactgttttcgatagtcagggtaatgctcatgatatgagcgtgtactttgtgaagaccggggataataagtggcaggtctacacccaggatagcagtgatccaacaggtacagctgagcctgcaatgacgctggtgtttaatgccaatggcgttctgacctcagatccaacaaaggatattaccaccggcgcaattaacggcgcagatcccgccacgtttagcctgagcttcctcaactccatgcagcaaaataccggcgctaacaacattgtggcaaccacccagaacggctacaaaccgggcgatctggtgagttatcaaatcaatgatgacggtacggttgtcggcaactattccaacgaacaaacccaactgctggggcagattgtactggcgaactttgccaacaacgaaggtctggcatccgaaggcgacaacgtctggtccgctacgcaatcttctggcgtggcgctgttggggacagccgggacgggcaactttggcacactgaccaacggtgcgctggaagcgtccaacgtcgatctcagtaaagaactggtcaatatgatcgttgcccagcgtaactatcagtctaacgcccagaccatcaaaacccaggaccagatcctcaacacgctggttaacttacgctaatcgctgacgggatagctcaatggatcacgcaatttataccgcgatgggagcagccagccagacgctgaatcaacaggcggtaaccgccagtaatctggccaatgcctctacgcccggttttcgcgcgcagttaaacgccttgcgcgcagtgccggtggaagggctttcactgcccacgcgcacgctggtaacggcgtcaacaccgggtgcagacatgacacccggcaagatggattacacctcgcgcccgctggacgttgcgttgcagcaggatggttggctggccgtgcagaccgctgacggcagtgaagggtatacgcgtaatggcagcattcaggttgatcccaccgggcaactgacaattcagggacatccggtggtaggcgaggcggggccaattgctgtgccggaaggggcggaaatcactattgctgccgatggcacaatctcggcgctgaatccgggcgatccggcaaatacggttgcgccagtggggcgtctgaagctggtgaaagccacgggcagcgaagtccagcgcggtgacgatggcatttttcgtttaagcgcagaaagccaggctacgcgtgggccggtactgcaggcagatccaaccttgcgtgtgatgtcgggggttctggaaggcagtaacgtcaatgccgttgcggcaatgagcgacatgattgccagcgcacggcgttttgaaatgcagatgaaggtgatcagcagcgtcgatgataacgcaggccgtgccaaccaactgctgtcgatgagttaattgaaaggatacatgacaagtataagttgccctatgcgcaagtttatcgggtctatgggggcaatcgcaatttatcgattttgcgagctcttgtaggccggataaggcgtttacgccgcatccggcaagaagacatatgcactttgtcactaatccactacaggacattttatgatcagttcattatggatcgccaaaacgggccttgacgcccagcaaaccaatatggacgtcattgccaacaacctggcaaacgttagtaccaacggttttaagcgtcagcgcgcggtgtttgaagatctgctgtatcaaaccattcgccagccgggggcacagtcttccgaacaaaccaccttaccctccggattacaaatcggtacgggggtacgcccggtcgccacggaacgtttacacagccagggcaacctgtcgcaaaccaataacagtaaagacgtcgcgattaaagggcagggctttttccaggtgatgttgccagatggctcatcagcctatacccgtgacggctctttccaggtggatcagaacgggcagctggtgacggccggtggttttcaggtgcagccagcgatcaccattccggcgaatgcgttaagtatcaccatcggtcgtgatggcgtggtcagcgtaacccaacaaggccaggcagctccggttcaggttgggcagctcaatctcaccacctttatgaatgacaccggactggagagcattggcgaaaacctctacaccgaaacgcaatcctccggtgcaccgaacgaaagcacgccgggcctgaacggcgcgggactgctgtatcaagggtatgttgaaacgtctaacgtcaacgtggcggaagaactggtcaatatgattcaggtgcaacgcgcttacgaaatcaacagtaaagcggtgtccaccaccgatcagatgctgcaaaaactgacgcaactctaaggcttaaccggtggcaggttcaccggtttactgatttttgaagatgatagccatgcaaaaaaacgctgcgcatacttatgccatttccagcttgttggtgctttcactaaccggctgcgcctggataccctccacgccgctggtacaaggggcgaccagtgcacaaccggttcccggtccgacgcccgtcgccaacgggtctattttccagtctgctcagccgattaactatggctatcaaccgctgtttgaagatcgtcgaccacgcaatattggcgatacgctgaccatcgtgttgcaggagaacgtcagcgccagcaaaagctcctctgcgaatgccagccgtgacggtaaaactaattttggctttgatactgtgccgcgctatttgcagggggtgtttggtaacgctcgtgccgatgtcgaagcctccggtggtaacacgttcaacggaaaaggcggggccaatgccagcaatacctttagcggtacgttgacggtgacggttgaccaggtactggtcaacggcaacctgcatgtggtgggtgaaaaacagatcgccattaatcagggtaccgaatttattcgcttctctggcgtggttaatccacgcactatcagcggcagcaataccgtaccatctactcaggtggcggatgcgcgcattgaatacgtaggcaatggctacattaacgaagcgcaaaatatgggctggttgcaacgtttcttccttaatctgtcgccaatgtaagtgaggctgtggtgattaaatttctctctgcattaattcttctactggttacgacggcggttcaggctgagcgtattcgcgatctcaccagtgttcagggggtaaggcaaaactcactgattggctatggcctggtggtggggctggatggaaccggtgaccagacaacccagacgccgtttaccacacaaacgcttaataacatgctctcacagctgggaattaccgttccgacgggcaccaatatgcagctaaaaaacgtcgctgcggtaatggtgacggcgtcacttccgccgtttggacgccaggggcaaaccatcgatgtggtggtttcttccatgggtaatgccaaaagcttgcgtggcggtacgttgttgatgacaccgcttaagggcgttgacagtcaggtgtatgctctggcgcagggcaatattctggttggcggcgcaggagcctctgctggcggtagcagtgttcaggtgaaccaactgaacggtggacggatcaccaatggtgcggttattgaacgtgaattgcccagccagtttggcgtcgggaatacccttaatttgcaacttaacgacgaagatttcagcatggcgcagcaaatcgctgacaccatcaaccgcgtgcgtggatatggcagcgccaccgcgttagatgcgcggactattcaggtgcgcgtaccaagtggcaacagttcccaggtccgtttccttgccgatatccagaatatgcaggttaatgtcaccccgcaggacgctaaagtagtgattaactcgcgcactggctcggtggtgatgaatcgcgaagtgaccctcgacagctgcgcagtagcgcaggggaatctctcggttacggtcaatcgtcaggccaatgtcagccagccagatacaccgtttggtggtggacagactgtggttactccacaaacgcagatcgatttacgccagagcggcggttcgctgcaaagcgtacgttccagcgccagcctcaataacgtggtgcgcgcgctcaatgcgctgggcgctacgccgatggatctgatgtctattttgcaatcaatgcaaagtgcgggatgtctgcgggcaaaactggaaatcatctgatgatcagcgacagcaaactactggcaagtgcggcctgggatgcgcaatcactcaacgaactaaaggcgaaagcgggcgaagatccagcggcaaatatccgtccggtggcccgccaggtggaagggatgttcgtgcagatgatgttgaaaagcatgcgcgacgctttaccaaaagatggcctgttcagcagcgagcacactcgcctgtataccagtatgtatgaccagcagattgcccaacagatgacggcgggcaaaggtctggggcttgcagagatgatggttaaacagatgacgccagaacaaccattgccagaggagcccacgccagcagcaccgatgaaattcccgctcgaaactgtggtgcgttatcaaaatcaggcgctttctcagctggtgcaaaaggccgtaccacgtaactacgatgattcgttgccgggtaacagtaaagcattcctcgcgcaactctcactgcccgcccaactggcaagccagcaaagcggtgtgccacatcatttgatcctcgctcaggcggcgcttgaatctggctgggggcaacggcaaatccgccgcgaaaacggcgagcctagttataacctgtttggcgtcaaagcctctggcaactggaaagggccagtcactgaaatcaccacgactgaatatgaaaacggcgaagcgaagaaagtaaaagcgaaatttcgggtctacagctcgtatctggaagcattgtcggattacgttgggctgttaacgcgtaacccgcgctacgccgccgtgacgaccgccgcgagtgcggagcagggggcgcaggccctacaggacgcgggctatgccaccgatcctcactatgcccgcaaactcaccaacatgattcagcagatgaaatcgataagcgacaaagtgagcaaaacctacagtatgaacattgataatctgttctgaataactcaagtccggcgggtcgctgccgataatactctgtaattgaaggcttataaggaacctccatgtccagcttgatcaataacgccatgagcggactgaacgcggcccaggcggcgttaaatacggcaagtaataatatctccagctataacgttgccggatatacccgccaaaccactattatggcgcaggccaatagcacgttgggcgctggcggctgggttggcaatggcgtctacgtttctggtgtgcagcgtgagtatgatgcgtttattaccaaccagttacgtgcggcgcagacgcaaagtagcggcctgactgcccgctatgagcagatgtcgaaaatcgacaatatgctctccaccagtacctcttcgctggcaacacagatgcaggatttcttcaccagcctgcaaacgctggtaagtaacgcggaagacccggcagcgcgccaggcgctgattgggaaatcagaagggttggtgaatcagtttaaaaccaccgatcaatatctgcgcgaccaggacaaacaggtcaatatcgcgataggtgccagcgttgatcagatcaacaattacgctaaacaaatcgccagcctgaacgatcaaatctcgcgtctgacaggcgtgggggcaggggcgtcacctaacaatctgctggatcaacgcgatcaactggtgagtgaattaaaccagattgttggcgtagaagttagcgttcaggatggtggcacttataacatcacgatggccaatggctactcactggttcagggaagtacggcgcggcagctggcggcagttccttccaccgccgacccttcgcgtacgactgtcgcttatattgatgggacggctggcaatattgagatcccggagaaattactgaataccgggtcgctgggcggcattctgacattccgttctcaggatctggaccagacgcgtaatacgcttggacaactggcgctggcatttgccgaggctttcaacacccaacacaaagccggatttgatgctaacggcgatgctggtgaagatttctttgctatcggtaagcccgcggtactgcaaaacacgaaaaacaaaggtgacgttgcgatcggtgccacggtaactgatgcctccgcggtactggcgacagattacaaaatctcgttcgataataatcagtggcaggtcacccgccttgccagcaataccacttttacggtgacgccggatgccaacggtaaagtggcatttgatggtctggagttgacgtttacaggaacgcctgccgttaacgacagcttcacgctgaaaccggtaagtgacgccatcgtcaacatggatgtattaatcaccgacgaagcaaaaatcgccatggcgagcgaagaagatgcgggtgatagcgacaaccgcaacggtcaggccctgctggatctgcaaagcaacagtaaaacggtgggcggtgcgaaatcctttaacgacgcttatgcctcattagtgagtgatatcgggaataaaaccgcgacgttgaaaaccagtagcgccacgcaaggtaatgtggtgacgcagctttccaatcagcagcagtcgatttccggtgtcaatctcgatgaggagtacggaaatctgcaacgttttcagcagtattacctggcgaatgcgcaggttctgcagacggcaaacgcgatttttgatgcgctgattaacattcgctaaggggagataaaatgcgtttcagtacccagatgatgtaccagcaaaacatgcgtggcatcaccaattctcaggcagaatggatgaagtacggcgaacagatgtcgacgggtaagcgagtcgttaacccttcagatgatcccattgctgcatcacaagctgttgttctctcccaggcacaggcacaaaacagccagtacacgctggcgcgtactttcgccactcaaaaagtgtcactggaagagagtgtgcttagccaggtcaccactgctatccagaatgctcaggaaaaaattgtctacgccagcaatggcaccttgagtgacgatgaccgggcctcgctggctacggatattcaggggcttcgtgaccagttactgaatctggcgaacaccactgacggtaacgggcgctacatttttgccggttataaaacagagactgcgccgtttagtgaggctgacggtgattatgtcggcggaacagaaagtattaaacaacaggtcgatgcttcgcgttcgatggtgataggacatacgggcgacaaaattttcgacagtattaccagcaacgcggtagcggaaccagacggtagcgcttctgaaaccaatctttttgccatgctggatagcgccatcgcagccctgaaaacgccggtcgcggatagcgaagcggataaagaaaccgccgctgcggcactggataaaaccaaccgcggactgaaaaactcgctgaacaatgtgctgactgttcgcgcggaattaggcacgcaactgaacgaactggagtcgctggattcattaggtagcgatcgcgctttagggcaaacgcagcagatgagcgatctggttgatgtggactggaatgcaactatttcatcttacatcatgcagcaaacggcattgcaggcatcgtataaagcatttaccgatatgcagggattgtcgctcttccagctcaacaaataagctcgctttaaaacatatcatgaaactgggtatgttttgtctgcccgctctgggatcgccggggcgggcatttttttgcctattttgtattgttggttagcaaggatgccatttgatgaattttaatatgttgactcaaagatgaaataaaaaagccctggcagttaccagggcttgattgcttgagctaattattactcaacaggttgcggacgcgcaggagcggcggaggcatgatgcgttgccgtatgaccacctgcggcacctttgccttcgaaggtaaaagtagggcgctgccagtcactgtgacgcggtgcttccggaacatattccggtgccggagcgcgcgtcatcggcgcggtagcgtggttatgctcaacggtgacctcaggttcaaccgcagctaccgtttcaacttctgctgtgacttcagcgacgactggcgcggcaggttgagcaacaacttcaggttcagcaaccacaacctcagcagtttcggcaacttcttcaatatctgccgtctcttcctgcggttcaaccaccggttctgcgtgttctgcaacttcctgggctacggcaacatcagattcggtaatcacctgcggctgttcagttaccgcggcagcaatcacttcaggatgcgtcgtttcaaccacttccggttgcggttcggcaacctgaacgggggcttctacgacttcagccacttcttcaacaactggcgcgctaacaacaggttcggcagcggcggcgacagggacctcagtcaccatcggctgcacttgtacttcttcctgttcgcgctgctcttcaacctgtacatcttgcggacgtacaattggatagcggatccagactttgccagaggccagttccggagacgcgcacgctacggtcaacggcattggcgactgggttggataacgctcgtcacgatagcgacgacgacgctgaccacttacgcgcaggtgacgaggcgagcggcgagaacgacgcggcatgccaccgttgtcacggttatcagcattgttctcttctggctgttctggtgcagtttgcgctacgactggcagcgggactttcaccagttctgtgcgtggggctggtgcttcctgaacaattggttcggctgcgacagtttcttcaaccaccggtgcgactaccgcttcttcggctacgctttgctcgtaacgcactttctgattgagctgacgctgtttacgacgtggctgaaccggacgtacacgttcttcctgttcggtttcctgaacagattgctcttcaacattcagcgccttcacttcttgttgcgcctgacgtttatcatcgttacggcggcggctacgttcacgacgcggcgtttgctgctcgtcggtggtacgcgctttttccgttacctctgcctgctgacggctctcacgcgtctcggcagtctgctgctgtgcctggcgacgattacgacggttttcttcgcgattatcgctgccttcagtacgttcactacgagggtcgcggcgctcattacggtcacggcggttgttctgacgaggcttgcgacgatcctgttgacgttccggtttcgcttctgctttcggtgttggttgctcggacggtttggtttcttcaccaccgctgaacagcgctttcagtgcgccgaagaagcggctcaacagcccaggttgggcaggagcggctggtgttgccggtgcagatttaggtgctggggctacgacaggcgcggcaggttcagctggcgttggtgctggcggcacatccggcatggcaaaggttgccagcgcaggttgttccggacgcttacgttcagcgaactcttcttcagacggcagcgccatcgcttcttcatgcagcttcggcagcatgtagcttaaggttggggtttcttcccctttgcgcacgcgcagcacatggtagtgcggggtttccatctgatcgtttggcacaatcacacagcgtacgccgtcctgacgagtttcaatcgcatttaccgcagaacgtttttcattcagcaggtaagaagcaattggcacaggaacaatggcgtgaacttcctgggtgttctctttcagcgcttcttcttcgatcagacgcagaatagagagcgacagcgattcgttgtcacgaacggtaccggtaccggagcagcgcgggcagacgtgatggctggattcacccagtgatgggctcaggcgctgacgggacatttccaacaggccaaagcgagaaatatggctgatttgaatacgcgcacggtcctgacgcaccgcttcacgcagacggttttctaccgcacgctggtggcgtacaggcgtcatgtcgatgaagtcgataacaatcaggccgccgaggtcacgcaggcgcagctgacgagcaatctcatcggcagcttcgaggttagtgttaaacgcggtttcttcgatatcgccgccgcgggtcgcgcgtgcggagttgatgtcgatggccgttaacgcttcggtgctgtcgataacaatcgaaccaccggatggcagacgaacttcacgctggaaggcggactcgatctgcgactcgatctggtagtggctgaacagcgggatctcgccggtgtacagtttgattttgctgctgaaatccgggcggcctaatgcagcgatatgctgacgtgccagttcgagcactttcgggttatcgataaggatttcaccgatgtcctggcgtaagtaatcgcggaatgcgcgaacgattacgttgctctcctgatgaatcaggaacggagccgggcggctttcagcggcttttttgatggcttcccagtgtttcagacggaagcttaaatcccattgcagcgcctcagcagatttgccgacgccagcggtgcgcacgataagccccatgccttccggcagttcaaggcttgccagtgcttcttttaattcggtacggtcgtcgccttcgatacgacgagaaataccgcccgcgcgcgggttgttcggcatcagaaccagatagctacccgccagactgataaaggtggttaatgccgcgcctttgttgccgcgctcttctttatcgatctgaacaatgacttcctgaccttcacgcaacacatctttaatgttgggacgaccatgagcactgtagttagcagggaaatattcgcgggcaatttcttttagtgggaggaaaccgtgacgttcagcgccgtaatcaacaaaagcagcttccagactcggttcaatgcgggtgattttacctttgtagatgtttgcctttttctgctcgtgccctggactttcgatatccaggtcatacagacgctgcccatctacaagggcaacgcgcaactcttcctgctgagttgcgttgattaacattcttttcatcgtaacttactcattattcttacattgacgactaagctgcgggcaaagtaacgcctttccgggtgtgaaccgatggcctcgtgtctagtcgcgtcgccaacctcacggttatcgtcagctcaaagaggcgcagagtgtcggttgcccgtttttcatgcggaaaaacagcgcaattatcagagaaacagactgggtattactctccagaaatatttccatctaccggtaaggactgcaacccgcagcccgctaactgcctgaaagatcaatacgtcttacgccattgctgcgtggatgatcggtcgggcaaaatgggttattccgtaaaatttcttgttttaacaaggatggacacggaaacggcctcattattccactgcaagccttgttatagcaagatgacttttaccatttatcacccgcttactcacagttttttcacttcttgctggtgattggtttaataaccatcaataaagtgatcacctagtgaagtaataaggtgcaaaactaaatataagcatagaaaaatgagtggcgcgaatcctgttggctaattagaatcgcccaccatgaaaacagagactccatccgtaaaaattgttgctatcaccgctgacgaagcggggcaacgtatcgacaactttttgcgtacccaattgaaaggcgtaccaaaaagtatgatttaccgtattttgcgtaaaggcgaagtgcgggtgaacaaaaaacgtattaagcctgaatataaactcgaagcgggtgatgaggtgcgtatcccaccggttcgcgttgctgagcgggaagaagaggcggtttcgccacatctgcaaaaggtggcggcgctggcggacgtcatcttatatgaagatgatcatatcctggtgctgaataaaccttccggtacggcggtacatggcggcagtggtttaagcttcggcgttattgaaggtttgcgggcgttgcgcccggaagcgcggttccttgaactggttcatcgtcttgaccgggacacctcaggtgtgttgctggtagcgaaaaaacgctcggcgttgcgttctctgcatgagcaattacgtgaaaaagggatgcaaaaagattacctggcgctggtgcgcggtcagtggcagtcgtatgtgaagagcgttcaagcgccgttactgaaaaatattctgcaaagcggcgaacgtatcgtgcgtgtgagtcaggaaggcaaaccgtcggaaacacgctttaaagtggaagaacgctatgcatttgccaccctggtgcgttgtagcccggtaacagggcgtactcatcagatccgtgtgcatacacaatatgcgggtcatccgattgcctttgacgatcgctacggtgaccgtgaatttgacagacagctcactgaagcaggcacgggattaaatcgcctgttcctgcacgccgcagcgttgaagtttactcatccggggaccggtgaggtgatgcgtattgaagcgccgatggatgaaggtttgaagcgttgtttgcaaaagctgcgtaacgcgcgctaatacaagcatataaacctgataatgggcggttggcctgataaggcgtttacgccgcatcaggccgccagcaccgattgccggatgcgaagtaaccgcatccggcgcaaaaaactatcccatcagcgggtttttcccttcccgacgtaacatctgacacagcgcgattagcggtaaaccaaccagcgtgttaggatcacgcccctctaaacgctcaaacagcgtaatgccaaatccttcactcttaaagctacccgcgcagtgcaggggatgctctttacgcacgtaattatcaatctccgcctcgctcaggtgacggaaatggacgtcaaaaggctccacttctgtttgtagatgcccattcgccgaattaaacaacgccagtccagtatagaaggtgacgatattgccgctggctttgcgtaattgcagacgggcattttcttccgttaacggtttaccggtgatttcgccatcaagaacacatacctggtctgaaccaataattaaatgatccggataacatgacgccagagattgcgctttttcttgtgccagtcgaagcaccaactgtcgcggtgattcgtcgctgcgtggagtttcgtcgacctcgggtgctgcacattcaaaagagatttgcagtttttccagaagagcgcgacgccagggcgaggtggaggctaaaataagtttaggcatatttttttccatcagatatagcgtattgatgatagccaatttaaactatgcgcttcgttttgctgactggcaactttgccagcactgaacgaaaataaggctgtaacccgcaatgtgtgcgaattattggcaaaaggcaaccgcaggctgcctttttctttgactatacgacgttacgaagttaatatgcgcgccctatgcaaaaggtaaaattacccctgactcttgatccggttcgtacggctcaaaaacgccttgattaccagggtatctatactcctgatcaggttgagcgcgtcgccgaatccgtagtcagtgtggacagtgatgtggaatgctccatgtcgttcgctatcgataaccaacgtctcgcagtgttaaacggcgatgcgaaggtgacggtaacgctcgagtgtcagcgttgcgggaagccgtttactcatcaggtctacacaacgtattgttttagtcctgtgcgttcagacgaacaggctgaagcactgccggaagcgtatgaaccgattgaggttaacgaattcggtgaaatcgatctgcttgcaatggttgaagatgaaatcatcctcgccttgccggtagttccggtgcatgattctgaacactgtgaagtgtccgaagcggacatggtctttggtgaactgcctgaagaagcgcaaaagccaaacccatttgccgtattagccagcttaaagcgtaagtaattggtgctccccgttggatcggggataaaccgtaattgaggagtaaggtccatggccgtacaacagaataaaccaacccgttccaaacgtggcatgcgtcgttcccatgacgcgctgaccgcagtcaccagcctgtctgtagacaaaacttctggtgaaaaacacctgcgtcaccacatcactgccgacggttactaccgcggccgcaaggtcatcgctaagtaatcacgcgtctgcgtgatgaagcttagtgaggattttccccaggcaactggggaaagaccaaaccgggcggcgacgataccttgacacgtctaaccctggcgttagatgtcatgggaggggattttggcccttccgtgacagtgcctgcagcattgcaggcactgaattctaattcgcaactcactcttcttttagtcggcaatcccgacgccatcacgccattacttgctaaagctgactttgaacaacgttcgcgtctgcagattattcctgcgcagtcagttatcgccagtgatgcccggccttcgcaagctatccgcgccagtcgtgggagttcaatgcgcgtggccctggagctggtgaaagaaggtcgagcgcaagcctgtgtcagtgccggtaataccggggcgctgatggggctggcaaaattattactcaagcccctggaggggattgagcgtccggcgctggtgacggtattaccgcatcagcaaaagggcaaaacggtggtcctcgatttaggggccaacgtcgattgtgacagtacaatgttggtgcaatttgccattatgggctcagttctggctgaagaggtggtggaaattcctaatcctcgcgtggcgttgctcaatattggtgaagaagaagtaaagggtctcgacagtattcgggatgcctcagcggtgcttaaaacaatcccttctatcaattatatcggctatcttgaagccaatgagttgttaactggcaagacagatgtgctggtttgtgacggctttacaggaaatgtcacattaaagacgatggaaggtgttgtcaggatgttcctttctctgctgaaatctcagggtgaagggaaaaaacggtcgtggtggctactgttattaaagcgttggctacaaaagagcctgacgaggcgattcagtcacctcaaccccgaccagtataacggcgcctgtctgttaggattgcgcggcacggtgataaaaagtcatggtgcagccaatcagcgagcttttgcggtcgcgattgaacaggcagtgcaggcggtgcagcgacaagttcctcagcgaattgccgctcgcctggaatctgtatacccagctggttttgagctgctggacggtggcaaaagcggaactctgcggtagcaggacgctgccagcgaactcgcagtttgcaagtgacggtatataaccgaaaagtgactgagcgtacatgtatacgaagattattggtactggcagctatctgcccgaacaagtgcggacaaacgccgatttggaaaaaatggtggatacctctgacgagtggattgtcactcgtaccggtatccgcgaacgccacattgccgcgccaaacgaaaccgtttcaaccatgggctttgaagcggcgacacgcgcaattgagatggcgggtattgagaaagaccagattggcctgatcgttgtggcaacgacttctgcgacgcacgctttcccgagcgcagcttgtcagattcaaagcatgttgggcattaaaggttgcccggcatttgacgttgcagcagcctgcgcaggtttcacctatgcattaagcgtagccgatcaatacgtgaaatctggggcggtgaagtatgctctggtcgtcggttccgatgtactggcgcgcacctgcgatccaacagatcgtgggactattattatttttggcgatggcgcgggcgctgcggtgctggctgcctctgaagagccgggaatcatctccacccatctgcatgccgacggtagctatggtgaattgctgacgctgcctaatgctgaccgtgtgaatccagagaattcaattcatctgacgatggcgggcaacgaagtcttcaaggttgcggtaacggaactggcgcacatcgttgatgagacgctggcggcgaataatcttgaccgttctcaactggactggctggttccgcatcaggctaacctgcgtattatcagtgcaacggcgaaaaaactcggcatgtcgatggacaatgtcgtggtgacgctggatcgccacggtaatacctctgcggcctctgtcccgtgcgcgctggatgaagctgtacgtgacgggcgcattaagccgggacagttggttctgcttgaagcctttggcggtggattcacctggggctccgcgctggttcgtttctaggataaggattaaaacatgacgcaatttgcatttgtgttccctggacagggttctcaaaccgttggaatgctggctgatatggcggcgagctatccaattgtcgaagaaacgtttgcagaagcttctgcggcgctgggctacgatctgtgggcgctgacccagcaggggccagctgaagaactgaataaaacctggcaaactcagccagcgctgttgactgcatctgttgcgctgtatcgcgtatggcagcagcagggcggtaaagcaccggcaatgatggccggtcacagcctgggggaatactccgcgctggtttgcgctggtgtaattgatttcgctgatgcggtgcgtttggttgagatgcgcggcaagttcatgcaagaagccgtaccggaaggcacgggcgctatggcggcaatcatcggtctggatgatgcgtctattgcgaaagcgtgtgaagaagctgcagaaggtcaggtcgtttctccggtaaactttaactctccgggacaggtggttattgccggtcataaagaagcagttgagcgtgctggcgctgcctgtaaagctgcgggcgcaaaacgcgctctgccgttaccagtgagcgtaccgtctcactgtgcgctgatgaaaccagcagccgacaaactggcagtagaattagcgaaaatcacctttaacgcaccaacagttcctgttgtgaataacgttgatgtgaaatgcgaaaccaatggtgatgccatccgtgacgcactggtacgtcagttgtataacccggttcagtggacgaagtctgttgagtacatggcagcgcaaggcgtagaacatctctatgaagtcggcccgggcaaagtgcttactggcctgacgaaacgcattgtcgacaccctgaccgcctcggcgctgaacgaaccttcagcgatggcagcggcgctcgagctttaaaagaggaaaatcatgaattttgaaggaaaaatcgcactggtaaccggtgcaagccgcggaattggccgcgcaattgctgaaacgctcgcagcccgtggcgcgaaagttattggcactgcgaccagtgaaaatggcgctcaggcgatcagtgattatttaggtgccaacggcaaaggtctgatgttgaatgtgaccgacccggcatctatcgaatctgttctggaaaaaattcgcgcagaatttggtgaagtggatatcctggtcaataatgccggtatcactcgtgataacctgttaatgcgaatgaaagatgaagagtggaacgatattatcgaaaccaacctttcatctgttttccgtctgtcaaaagcggtaatgcgcgctatgatgaaaaagcgtcatggtcggtattatcactatcggttctgtggttggtaccatgggaaatggctggtcaggccaaactacgctgcggcgaaagcgggcttgatcggcttcagtaaatcactggcgcgcgaagttgcgtcacgcggtattactgtaaacgttgttgctccgggctttattgaaacggacatgacacgtgcgctgagcgatgaccagcgtgcgggtatcctggcgcaggttcctgcgggtcgcctcggcggcgcacaggaaatcgccaacgcggttgcattcctggcatccgacgaagcagcttacatcacgggtgaaactttgcatgtgaacggcgggatgtacatggtctgaccgcgatttgcacaaaatgctcatgttgcgcgcagtctgcgtggttatgagtaataattagtgcaaaatgatttgcgttattggggggtaaggcctcaaaataacgtaaaatcgtggtaagacctgccgggatttagttgcaaatttttcaacattttatacactacgaaaaccatcgcgaaagcgagttttgataggaaatttaagagtatgagcactatcgaagaacgcgttaagaaaattatcggcgaacagctgggcgttaagcaggaagaagttaccaacaatgcttctttcgttgaagacctgggcgcggattctcttgacaccgttgagctggtaatggctctggaagaagagtttgatactgagattccggacgaagaagctgagaaaatcaccaccgttcaggctgccattgattacatcaacggccaccaggcgtaagtgaacatctccaggcggtcgttcgaccgcctgagttttatcttttgtcccactagaatcattttttccctccctggaggacaaacgtgtctaagcgtcgtgtagttgtgaccggactgggcatgttgtctcctgtcggcaataccgtagagtctacctggaaagctctgcttgccggtcagagtggcatcagcctaatcgaccatttcgatactagcgcctatgcaacgaaatttgctggcttagtaaaggattttaactgtgaggacattatctcgcgcaaagaacagcgcaagatggatgccttcattcaatatggaattgtcgctggcgttcaggccatgcaggattctggccttgaaataacggaagagaacgcaacccgcattggtgccgcaattggctccgggattggcggcctcggactgatcgaagaaaaccacacatctctgatgaacggtggtccacgtaagatcagcccattcttcgttccgtcaacgattgtgaacatggtggcaggtcatctgactatcatgtatggcctgcgtggcccaagcatctctatcgcgaccgcctgtacttccggcgtgcacaacattggccatgctgcgcgtattatcgcgtatggcgatgctgacgtgatggttgcaggtggcgcagagaaagccagtacgccgctgggcgttggtggttttggcgcggcacgtgcattatctacccgcaatgataacccgcaagcggcgagccgcccgtgggataaagagcgtgatggtttcgtactaggcgatggtgccggtatgctggtacttgaagagtacgaacacgcgaaaaaacgcggtgcgaaaatttacgctgaactcgtcggctttggtatgagcagcgatgcttatcatatgacgtcaccgccagaaaatggcgcaggcgcagctctggcgatggcaaatgctctgcgtgatgcaggcattgaagcgagtcagattggctacgttaacgcgcacggtacttctacgccggctggcgataaagctgaagcgcaggcggtgaaaaccatcttcggtgaagctgcaagccgcgtgttggtaagctccacgaaatctatgaccggtcacctgttaggtgcggcgggtgcagtagaatctatctactccatcctggcgctgcgcgatcaggctgttccgccaaccatcaacctggataacccggatgaaggttgcgatctggatttcgtaccgcacgaagcgcgtcaggtcagcggaatggaatacacgctgtgtaactccttcggcttcggtggcactaatggttctttgatctttaaaaagatctaagttgtcatttcccacccttataaaaggtccgcttgcgggccttttttcttagcttttattccgacttgttccgtagtgaacatgctgccacactaacaattctctgataaggagctggtatgttcttaattaacggtcataagcaggaatcgctggcagtaagcgatcgggcaacgcagtttggtgatggttgttttaccaccgccagagttatcgacggtaaagtcagtttgttatcggcgcatatccagcgactacaggatgcttgtcagcggttgatgatttcctgtgacttctggcctcagcttgaacaagagatgaaaacgctggcagcagaacagcagaatggtgtgctgaaagtcgtgatcagtcgcggtagtggcgggcgagggtacagcacattgaacagtggaccggcaacgcggattctctccattacggcttatcctgcacattacgaccgtttgcgtaacgaagggatgatgttggcgctaagcccggtgcggctggggcgcaatcctcaccttgcaggtattaaacatcttaatcggcttgagcaagtattgatccgctctcatcttgagcagacaaacgctgatgaggcgctggtccttgacagcgaagggtgggttacggaatgctgtgcggctaatttgttctggcggaagggcaacgtagtttatacgccgcgactggatcaggcaggtgttaacggcattatgcgacaattctgtatccgtttgctggcacaatcctcttatcagcttgtcgaagtgcaagcctctctggaagaggcgttgcaggcagatgagatggttatttgtaatgcgttaatgccagtgatgcccgtacgtgcctgtggcgatgtctccttttcgtcagcaacgttatatgaatatttagccccactttgtgagcgcccgaattagtcatgaaaaaagtgttattgataatcttgttattgctggtgggtactgggtatcgccgctggtgtgggcgtctggaaggttcgccatcttgccgacagcaaattgcttatcaaagaagagacgatatttacccttaagccagggaccggacgtctggcgctaggtgaacagctttatgccgataagatcatcaatcgcccacgggtttttcaatggttgctgcgtatcgaaccggatctttctcactttaaagccgggacttaccgctttacaccgcagatgaccgtgcgcgagatgctgaaattgttggaaagcggtaaagaagcacagttcccgctgcgactggtagaagggatgcgtctgagcgactacctcaagcaattgcgtgaggctccgtatatcaagcacacgctgagcgacgataagtacgccaccgtagcgcaggcacttgaactggaaaacccggagtggattgaaggttggttctggccagacacctggatgtataccgccaataccaccgatgtcgcgttactcaagcgagcgcacaagaaaatggtgaaagcggtcgatagcgcctgggaagggcgtgcggacggtctgccttataaagataaaaaccagttggtgacgatggcatcaattatcgaaaaagaaaccgccgttgccagtgaacgcgatcaggttgcctcagtatttatcaaccgtttacgcattggtatgcgcctgcagaccgacccgaccgtgatttacgggatgggagagcgttataatggcaaactttctcgtgcagacctggaaacgccgacagcgtataacacctataccattaccggtctgccgccaggtgcgatagcgacgccgggggcggattcgctgaaggctgctgcgcatccggcaaaaacgccgtatctctattttgtggccgatggtaaaggtggtcacacgtttaataccaatcttgccagtcataacaagtctgtgcaggattatctgaaagtgcttaaggaaaaaaatgcgcagtaagtatatcgtcattgaggggctggaaggcgcaggcaaaactaccgcgcgtaacgtggtggttgagacgcttgagcaactgggtatccgcgacatggttttcactcgggaacctggcggtacgcaacttgccgaaaagttaagaagccttgtgctggatatcaaatcggtaggcgatgaagtcattaccgataaagccgaagttctgatgttttatgccgcgcgcgttcaactggtagaaacggtcatcaaacctgcgctggctaacggcacctgggtgattggcgatcgccacgatctctccactcaagcctatcagggtggaggacgaggtattgaccaacatatgctggcaacactgcgtgatgctgttctcgggggggttcgccccgacttaacgctctatctcgatgttaccccggaggttggcttaaaacgcgcgcgtgcgcgcggcgagctggatcgtattgagcaagaatctttcgatttctttaatcgcacccgcgcccgctatctggaactggcagcacaagataaaagcattcataccattgatgccacccagccgctggaggccgtgatggatgcaatccgcaccaccgtgaccaactgggtgaaggagttggacgcatgagatggtatccatggttacgacctgatttcgaaaaactggtagccagctatcaggccggaagaggtcaccatgcgctactcattcaggcgttaccgggcatgggtgatgatgctttaatctacgccctgagccgttatttactctgccaacaaccgcagggccacaaaagttgcggtcactgtcgtggatgtcagttgatgcaggctggcacacatcccgattactacaccctggctcccgaaaaagggaaaaatgcgctgggcattgatgcggtacgtgaggtcaccgaaaagctgaatgagcacgcacgcttaggtggtgcgaaagttgtctgggtaaccgatgctgccttactaaccgacgccgcggctaacgcattgctgaaaacgcttgaagagccaccagcagaaacgtggtttttccttgctacccgcgagccagaacgtttactggcaacattacgtagtcgttgtcggttacattaccttgcgccgccgccggaacagtacgccgtgacctggctttcacgcgaagtgacaatgtcacaggatgcactacttgccgcattgcgcttaagcgccggttcgcctggggcggcactggcgttgtttcagggagataactggcaggctcgtgaaacattgtgtcaggcgctggcatatagcgtgcaatcgggcgactggtattcgctgctggcggcccttaatcatgaacaagctccggcgcgtttacactggctggcaacgttgctgatggatgcgctaaaacgccattatggcgctgcgcacgtgaccaatgttgatgtgccggggctggtcgtcgaactggcaaaccatctttctccctcgcgcctgcaggctatactgggggatgtttgccacattcgtgaacagttaatgtctgtcacaggtatcaaccgcgagcttctcatcaccgatcttttactgcgtattgagcattacctgcaaccgggcgttgtgctaccggttcctcatctttaagagagacatcatgtttttagtcgactcacactgccatctcgatggtctggattatgaatctttgcataaggacgtggatgacgttctggcgaaagccgccgcacgcgatgtgaaattttgtctggcagtcgccacaacattaccgggttatttacacatgcgggatctggtaggcgaacgcgacaacgtcgtattttcttgtggcgtgcatccactcaaccagaatgatccctacgatgtagaagatttacgtcgtctggcggcagaagagggcgttgtagcgctgggtgaaaccgggctggattattattacacgccggaaactaaagtacgtcagcaagagtccttcatccatcatatccagattggtcgtgaactgaacaagccggttatcgtccacacccgtgacgcccgcgccgatacgctggcaattctgcgcgaagaaaaagtgacggattgcggtggcgtactacactgttttacagaggacagagaaacggcgggcaaattactggatctcggattttacatctccttttccggcattgtgaccttccgtaatgcggagcaactgcgcgatgctgcgcgttatgtccccctggatcggttactggtggaaactgactcaccttaccttgcgccagtaccgcatcgaggaaaagagaatcaacctgcgatggttcgtgacgttgcagaatacatggctgtgttgaaaggtgttgccgttgaagaactggcgcaggtaaccaccgataacttcgcccgtctgtttcacatcgacgcttcccgccttcaatccatccgttgaatgagtttttttaaagctcgtaattaatggctaaaacgagtaaagttcaccgccgaaaatcgggcggtgaataaccacgtttgaaatattgtgacatatgttttgtcaaaatgtgcaacttctccaatgatctgaagttgaaacgtgatagccgtcaaacaaatcggcactgaattattttactctgtgtaataaataaagggcgcttagatgccctgtacacggcgaggcactccccccttgccacgcgtgagaacgtaaaaaaagcacccatactcaggagcactctcaattatgtttaagaatgcatttgctaacctgcaaaaggtcggtaaatcgctgatgctgccggtatccgtactgcctatcgcaggtattctgctgggcgtcggttccgcgaatttcagctggctgcccgccgttgtatcgcatgttatggcagaagcaggcggttccgtctttgcaaacatgccactgatttttgcgatcggtgtcgccctcggctttaccaataacgatggcgtatccgcgctggccgcagttgttgcctatggcatcatggttaaaaccatggccgtggttgcgccactggtactgcatttacctgctgaagaaatcgcctctaaacacctggcggatactggcgtactcggagggattatctccggtgcgattgcagcgtatatgtttaaccgtttctaccgtattaagctgcctgagtatcttggcttctttgccggtaaacgctttgtgccgatcatttcaggcctggctgccatctttactggcgttgtgctgtccttcatttggccgccgattggttctgcaatccagaccttctctcagtgggctgcttaccagaacccggtagttgcgtttggcatttacggtttcatcgaacgttgcctggtaccgtttggtctgcaccacatctggaacgtacctttccagatgcagattggtgaatacaccaacgcagcaggtcaggttttccacggcgacattccgcgttatatggcgggtgacccgactgcgggtaaactgtctggtggcttcctgttcaaaatgtacggtctgccagctgccgcaattgctatctggcactctgctaaaccagaaaaccgcgcgaaagtgggcggtattatgatctccgcggcgctgacctcgttcctgaccggtatcaccgagccgatcgagttctccttcatgttcgttgcgccgatcctgtacatcatccacgcgattctggcaggcctggcattcccaatctgtattcttctggggatgcgtgacggtacgtcgttctcgcacggtctgatcgacttcatcgttctgtctggtaacagcagcaaactgtggctgttcccgatcgtcggtatcggttatgccattgtttactacaccatcttccgcgtgctgattaaagcactggatctgaaaacgccgggtcgtgaagatgcgactgaagatgcaaaagcgacaggtaccagcgaaatggcaccggctctggttgctgcatttggtggtaaagaaaacattactaacctcgacgcatgtattacccgtctgcgcgtcagcgttgctgatgtgtctaaagtggatcaggctggcctgaagaaactgggcgcagcgggcgtagtggttgctggttctggtgttcaggcgattttcggtactaaatccgataacctgaaaaccgagatggatgagtacatccgtaaccactaatccgtaagacgttggggagactaaggcagccagatggctgccttttttacaggtgttattcagaattgatacgtgccggtaatgctgaaattacgcggtgcgccgtagacgatagaaccttccacgttggtatcgtaggttttgtcgaacaggttattgacgttcccctgtaacgagaagtttttcgtcacctggtagcgggtgaagagatccaccagcgcgtagctaccttgctcggcgcggaaggtgccatacggtgtcacggtgtcggtatacacgcgattttgccagttaacaccaccgccgaccgtcaactctggcatgacaggcaaccggtagctggtgaacattttaaccgtggtgcgtggcagattaggattaacggcgtttccttcgttatcttctgcaatatagcgcgttgcgccaaacgtcagctgccagttgtcggtaattgcgccgttgagttcaaattccacacctttactgactgtcccatccaccgctttataggcggtttcgccgttgctgccggggataggtgtaccggtggactgagcgacattatcctgctcaatacggaagatggctaacgtggtggtcagacggctattcatccagtccgatttcagacccagctcgtagttgttaccggtgattggagtcagatatttgcctgaactgtcacgatcattttgcggctggaaaatagaggtatagctggcgtaggtcgaccagttgtcattgatgtcaaacaccagaccagcgtaaggcgtggtgtggtttttctccatgctgtaagtcagcgtatcaacccgccagttggtataacgtgcgccgaggatcagatgcagcggatcggcaagggtgacacgagtggcagcatataacgatttcatatgtgtggtatcgtcctgcgccaggctctgtggtgaccagtcggtttgtgggaaattgccattaaagttgtagaaactgccaatttcatccgggaagatgttggcccatgaactgaagtaacgattgttttgtttgctgtaactgccaccaaacattagattgtgctgacgaccaaacaattcataactaccgtcagcgaacaaatccagcgcatcaactttacgtttgccgctgttccaaccggtgccgccgacataatcaaaaccaggtccataattactgtatggcccaaccagcataccatccgctttgtttacataggcatcgacatacatcattttgctgtcaaattcgacttcagagtgggtggcattcagcgtcgcttgccaggtatcagcaaaccgctgcttcagggtcataaagaccttgttgatctctttatcgttgtacgcccagtcaggtgcggtactgcgtgcgcgatcgtaactgttgctgctgccatcagagattaggattaacggcgtttccttcgttatcttctgcaatatagcgcgttgcgccaaacgtcagctgccagttgtcggtaattgcgccgttgagttcaaattccacacctttactgactgtcccatccaccgctttataggcggtttcgccgttgctgccggggataggtgtaccggtggactgagcgacattatcctgctcaatacggaagatggctaacgtggtggtcagacggctattcatccagtccgatttcagacccagctcgtagttgttaccggtgattggagtcagatatttgcctgaactgtcacgatcattttgcggctggaaaatagaggtatagctggcgtaggtcgaccagttgtcattgatgtcaaacaccagaccagcgtaaggcgtggtgtggtttttctccatgctgtaagtcagcgtatcaacccgccagttggtataacgtgcgccgaggatcagatgcagcggatcggcaagggtgacacgagtggcagcatataacgatttcatatgtgtggtatcgtcctgcgccaggctctgtggtgaccagtcggtttgtgggaaattgccattaaagttgtagaaactgccaatttcatccgggaagatgttggcccatgaactgaagtaacgattgttttgtttgctgtaactgccaccaaacattagattgtgctgacgaccaaacaattcataactaccgtcagcgaacaaatccagcgcatcaactttacgtttgccgctgttccaaccggtgccgccgacataatcaaaaccaggtccataattactgtatggcccaaccagcataccatccgctttgtttacataggcatcgacatacatcattttgctgtcaaattcgacttcagagtgggtggcattcagcgtcgcttgccaggtatcagcaaaccgctgcttcagggtcataaagaccttgttgatctctttatcgttgtacgcccagtcaggtgcggtactgcgtgcgcgatcgtaactgttgctgctgccatcagtattccagcgcggtaaaccaccccaggttgggctattaacatcaatacgctgatattcgtaaccggctgaaagcatcgtaagatcgcctaaatcagcatcgacaatgccggagaagaaggtcttttcactgttgtagcggtccagccatgagtcgttattctggtagccgccgacaattcgtgcgcggattttaccatcttcggtgagtgggctttgtaaatccgccacataccgttctttgttccagctaccgtattccgccgagacatcgcctttaaattcacgactggtcgcgtgttttcgaaccatattaattgccgcagatggattacccgtcccggtcatgaggcctgtcgcgccacgcactacttctacgcgttcaaacagtgccatatcagaaagtgcgtcgcccagattccagcgcgattcaaaataggtggggataccatcaaccatatagttatcgatctggaatccgcgggaataataaagagcacgatcggaatccgcctgacttttgctgatccccagcgtgttttccatcacttcgcccagcgtttgtaactgctgatcttccatccgctgctggctaacaatagtgaccgactgaggaatatcacgttgagtcatctgcatttttgtacccgcagaggtagacgttacgttgtaatcattttcgccatcatctggggctgtggctgaaccctcaacaatcaccgtttcttcagtgactggtgcagcaaaagcggcggaaggtaatagtgccagtgctatgcaaccggcaaggagtgacggtttgatgatagcttgatgttgattatccctgttaaattgtgtcgaaagcatttgaaatctcttggtttatgttggcgtcaggctcatgccggagcagggtgatgagcggttatatttagtgtgcgaataattttatatgtaaatgcaaatgagaaatatacgcattcatatttagtgtgtaaaccaaacagagaatgtcttttcagcgcattcgcaggcagaaatgggaataatggcgatatatacggcagcaaaacgattttttgcttaagaaatcgttagttaaggttgaaagagcaggtttaactcgaccatactctatactcgcagtgtggcgcggcgtagcatggcgcaacgcatggctatttgaaaaaggaaaatgtcgtggcagaagaaactatattcagcaaaattattcgtcgtgagatcccctccgatatcgtctaccaggatgatctggtaacggcgtttcgcgatatttcgccgcaagcgccaacgcatattctgatcattccgaatatcctcattccgacagtgaacgacgtgtcagctgagcatgagcaggcgctgggacgcatgatcaccgtagcggcaaaaattgctgagcaagaaggtattgccgaagatggctatcgtctgatcatgaacaccaaccgccatggcggacaagaggtttaccacatccatatgcatttgttgggtggctgtccgctgggaccaatgctggcgcataaaggtctgtaacgatgagaaaaggatgctttgggctgatgtctctggcgttgttagtgctggtgggctgtcgttcacatccggaaattccggtgaatgatgagcaatcgctggtgatggagtcatctttattagctgcgggcatcagtgcagaaaagcccgtcctttcgacatctgatattcaaccttcagcatcctcaacgctttataacgaaaggcaagaacccgttaccgttcattatcgtttttactggtatgacgccagagggctggagatgcatcctctggaaaggccacgcagcgttaccattcccgcacattcggcggtcacgctgtacggcagcgccaattttctgggggcgcacaaagtcagactttatctatatttgtaaggggtgaatcttgatgacaaaaatgagtcgctacgccttgattaccgcgctggcgatgtttcttgccgggtgtgtggggcaacgtgaacctgcaccggtagaagaagtgaaaccagcgccggaacaacctgctgagccacaacagcctgtccccacagtgccatcggtgccgacgataccgcagcagccaggcccaattgagcacgaagatcaaactgcaccgcttgcgccgcatattcgccattatgactggaatggcgcaatgcagccgatggtcagtaagatgcttggggctgacggcgtgactgcgggtagcgtcctgctggttgatagcgttaacaaccgtactaacggttcgttgaatgccgcagaagcgaccgaaacgctgcgaaatgcgctggctaataacggtaaatttaccctggtttccgcccagcagctgtcgatggctaagcaacaattaggtttatcgccgcaggacagtttaggcacccgtagtaaagccataggcattgcccgcaatgttggcgctcattacgtgctgtactccagcgcctctggcaacgttaacgctccgaccctacaaatgcagctgatgctggtgcagacgggcgaaattatctggtcaggtaaaggtgccgtttcgcagcaataatcccctcacgcgcgacgaattgctgtcgcgctttttcccgcagtttcatcccgtcacgacgtttaatagtgggcttagtggcgggagttttctcattgaacatcagggccagcgttttgttgtgcgtcagccgcacgatcctgatgcgccgcagtccgcgttcttgcgacagtatcgggctttatcacaactacccgcatgcattgcaccgaagccgcatttatatctccgtgactggatggtggttgactatctgcccggcgaggtaaaaacgtatttgccggataccaacgaactggcaggcttgctgtattatctacatcaacaaccgcgttttggctggcgaataacgctgttgccgttactggaactgtactggcagcaaagcgatccggcgcggcggacagtgggttggctgcgaatgttaaaacgtctgcgcaaagcgcgggaaccacggcttttacgcttaagtccattgcatatggatgtccacgccggaaatttagtgcatagcgcgtcagggttaaaactcatcgactgggagtatgccggagatggtgatatcgcgctggaactggcggcggtgtgggtggaaaatactgaccagcatcggcaattggtcaatgactatgccactcgcgcgaagatttatccggcgcaattatggcgtcaggtcaggcgatggtttccctggctgctgatgctcaaagcagggtggtttgagtaccgctggcgacaaaccggcgatcaacaatttatcaggctggccgatgacacctggcggcagctattaataaaacaataaggagagcagtgtgggtccagtaatgttggatgtcgaaggttacgaactggacgcggaagagcgtgaaatactggcgcatccgctggtgggagggctgattctctttacgcgaaactatcatgatcctgcccagttacgtgaactggtgcgccagatccgcgcagcatcgcgcaatcatctggtggtggcggtagatcaggaaggtggacgcgtgcagcgttttcgtgaaggttttacccgcttgccagcggcacaatcattcgctgcgctgttgggaatggaagaaggcggaaaactggggcaagaggcaggttggttgatggccagcgaaatgattgctatggatattgatatcagctttgcgccagtgctggacgtcgggcatatcagcgcggcgattggcgagcgttcttatcatgccgatccacaaaaagctctggcaattgccagccgttttattgatggtatgcatgaagcgggaatgaaaactaccgggaaacacttcccaggtcacggtgcagtaacggcagactcacacaaagaaacaccgtgcgacccacgtccgcaagcggagattcgcgctaaagatatgtcggtcttcagttccttaatccgcgaaaataaactcgacgccattatgcctgcgcatgtgatctacagtgatgttgatccgcgtccggcgagcgcttctccctactggctgaaagccgttttgcgtcaggaattgggttttgacggcgtgattttctctgacgatttatcgatggaaggcgcagcgattatgggcagttatgccgagcgtggacaggcatcactggatgcaggttgcgatatgatcctggtctgcaataatcgtaaaggggccgtcagcgtgttagataatctgtcaccgatcaaggcagaacgtgttacacgtttgtatcataaaggttcattttcgcgacaggaactgatggactcggctcgctggaaagcgatcagcgcccgtctgaatcagttacatgaacgctggcaggaagagaaggcaggtcattaaccctggcttatgtgaggaagcgatgattatctatttgcacggttttgactctaacagtccgggtaaccacgagaaagtcttacaattgcagtttattgacccggatgtacggctaataagctacagtacgcggcatccgaaacatgatatgcagcatttgctcaaagaagtggacaaaatgttgcaactgaacgtcgacgagcgcccgctcatttgtggtgttggtctgggcggttattgggctgagcggattggttttctctgtgatatccgccaggtgatcttcaaccccaatttgttcccttatgagaacatggaagggaagattgatcgcccggaagagtatgccgatattgccactaagtgtgtgaccaacttccgtgagaagaatcgcgatcgttgcctggtgattttgtcgcgtaatgatgaagcgcttaacagccagcggacatctgaagagttgcatcattattacgagattgtctgggacgaagagcagacgcacaaattcaagaatatctccccgcatttacagcgcattaaagcgttcaaaaccctcgggtaaatgccctcgtcgcatcaggtaaccttgccggtacctgatgcgctccggattctgtgggttggataaggcgttccgccgcatccgacagtcgagcatcaatgcctgatgcgcctcttatcaggcctaccgaatgccctccatacacacctcactctatatcactctcacaaatcagctcaaataataaacaacaaactctgttttttgatctcacccggtaaagtcgcctatcttttcagcaacaaaacttgattaacatcaattttggtatgaccaatgcaccattcatgttattctcaatagcgaagaacattttcattgctgtaacctgttgttaattaagagctatgttaataaccattaattaacaattggttaataaatttaagggggtcacgttgactacgccattgaaaaaaattgtgattgtcggcggcggtgctggtgggctggaaatggcaacacagctggggcataagctgggacgcaagaaaaaagccaaaattacgctggtcgatcgtaaccacagccacctgtggaaaccgctgctgcacgaagtggcgactggctcgcttgatgaaggcgtcgatgcgttgagctatctggcccatgcgcgcaatcatggtttccagttccagctgggttccgtaattgatattgatcgtgaagcgaaaacaatcactattgcagaactgcgcgacgagaaaggtgaactgctggttccggaacgtaaaatcgcctatgacaccctggtaatggcgctgggtagcacctctaacgatttcaatacaccaggtgtcaaagagaactgcattttcctcgataacccgcaccaggcgcgtcgcttccaccaggagatgctgaatctgttcctgaaatactccgccaacctgggcgcgaatggcaaagtaaacattgcgattgtcggcggcggcgcgacgggtgtagaactctccgctgaattgcacaacgcggtcaagcaactgcacagttacggttataaaggtctgaccaacgaagccctgaacgtaacgctggtagaagcgggcgaacgtattttgcctgcattgccgccacgtatctctgctgcggcccatagtgagttaacgaaacttggcgttcgcgtgctgacgcaaaccatggtcaccagtgctgatgaaggcggcctgcacactaaagatggcgaatatattgaggctgatctgatggtgtgggcagccgggatcaaagcgcctgacttcctgaaagatatcggtggtcttgaaaccaaccgtatcaaccagctggtggtggaaccgacgctgcaaaccactcgcgatccagacatatacgctattggcgactgcgcgtcatgcccgcgtccggaagggggctttgttccgccgcgcgctcaggccgcacatcagatggcaacctgtgcaatgaacaacattctggcgcagatgaacggtaagccgctgaaaaattatcagtataaagatcacggttcgctggtatcgctgtcgaacttttccacagtcggtagcctgatgggtaacctgacgcgcggctcaatgatgattgaaggacgaattgcgcgctttgtatacatctcgctgtaccgaatgcaccagattgcgctgcatggttactttaaaaccggattaatgatgctggtggggagtattaaccgcgttatccgtccacgtttgaagttgcattaatcggcttgtactggcggatgcggcgtaaacgccttatccgccctggacaaatggtacgagcggtaggcctgataagacgcgttaagcgtcgcatcaggcattccttcagactcctccgaatccctaagtatttccagccattcccgcgcttttcatcttctgtctgatagctgcttttctccttcgcttgcatgattggcataacagcaaagaaggaggtattcccgtgaataagtcaatgttggcgggtatcgggattggtgtcgcagctgcgctgggcgtagcggcagtggccagtctgaacgtgtttgaacgtggcccgcaatacgctcaggttgtttctgcaaccccaatcaaggaaacggttaaaacaccgcgtcaggagtgtcgcaacgtcacagtgacccatcgtcgaccggtgcaggatgaaaatcgcattaccgggtcggtgctcggcgctgttgctggcggcgtgatagggcatcagtttggtggtggtcgcggtaaagatgtcgccactgttgtgggggcgctgggtggtggatatgccggtaaccagatccagggctctctccaggaaagcgatacttacacgactacgcaacagcgttgtaaaacggtgtatgacaagtcagaaaaaatgctcggttatgatgtgacctataagattggcgatcagcagggcaaaatccgcatggaccgcgatccgggtacgcagatcccgctagatagcaacgggcaactgattttgaataacaaagtataacaaggctgtactctgcaatttggccccttattcgctcaggctgaggggcttttttggagggtctttttttgcgacttatttcaccagttcgggccataaacgcaaagtcgttccggcaatctgcatcagtttttccagcgatgcaccttcgcgtgcgctgatcgacatcccctgaataatacaattaaggaattctgccagatgcgtcacgtcacagtgggtcgggatttccccgcgcgcttgtcgttgacataaaaactgctgcaaagtgcgctcttgcatcgcatggcgtgatttcagcgtattggcgatatctcctgaatccggggagagggtggtgcagttgttgatcatgaagcagcctgccggggtgtctttgctggtaaagcagttggcgatggcagcaaaatagtcagccagcgcagactccacgcttttctcttcacaaaacagctgtgcttcatgcttagcggcaaagcgatcgatataacggtcgagtacggcgcgaaataacccctctttgttggtaaattccgcgtatagcgtgggcgctttggctccggtcgcttcgacgaggtccgcaagagaagtcgcttcataaccgtgctgccagaacaatttcatggccttatcaagcgcggcatccctgtcgaacacttttgggcggccgcggcttttttttacacattgtgttgagtcagttgccatgatgccgttgtacctggtgactgtgaatgaaaggttattataaaaataatcatctccgttcaccagtccacaaaccataaaaataattgctttctatttaactgaaatttaaagatttttaaattaattaatgattgttataaaaaatatcttgtatgtgatccagatcacatctatcatttagttatcgatcgttaagtaattgcttgcgacgtcattcatctgcataaggccactattatgaaaaacgtaaaaaccctcatcgctgcggcgattttaagctcaatgtcatttgccagctttgcggctgtcgaagttcagtcaacgccagaaggccaacaaaaagtcggtactatcagtgctaacgcggggacaaatctgggatcgctggaagagcagctggcgcaaaaagcggatgagatgggcgcaaaatctttccgtattacttctgtaaccggtccgaataccctccatggaacagcagtaatttataaataagcattaaccctcattaatgcctgctactgctgattttttccccgcgacatgctgtgtcgcggggatttttttatccgagctttacagagtttgtgggctcacttgatgacggcggacatccaccggcatcccggaacggacatccatcacatgttgcatcacttcagcgtcagtttgtgctgcatctttaaatgattgcattgcgctattcagcgtaattggcagcagctgcggatcgtcatcaatcttctctgacagcggctgatgtacttcaaccagacgcgcaccgtttggttcggcagagattttaatcggggtgttgatgatattcactttggtgcctggggtgacctggctaaagagtgttttgatatcgtcatcccgcagacgaatacagccagaacttacccgcatgccaatgccgaaatcagcgttcgtaccgtgaagcaaataaacgccgccataggccgccagacgaatcgcatgatggcccattgggttatccggtccagccggaactaccgcaggcaactcaattccctgtgccttataccgcgcgcgaatgtttgccgttggcgtccaggttgggtttgcacgcttgtcagaaacagtggtcaccattgtcggtgtcagcgtgtcaccacctaactgaccaatgccgatgggatatacggttaccgaattttttcccggcggataataatagagacgcagctccgcaatgttgatcacaatgccttcgcgcggcgcgtctggaagtagggtttgcaacgggatcgttaacacgctacccgcgcgcggtacgtaaggatcaacgccggggttagcctgtaacagagcgagaaagccgacgttatattttttggcgatcgcttccagagaaccaccgtcattttccaccacatgaaatttgttttcaccaaccagacgactgtccgctgacggcagcggccaggtgttggcttttgccggtagcgccagcgccacggcagcggcgaacgtaaaaaacgttagccagcgagaaaaacgcgttttgatcatcaccaaagtcaataataaatataaggttattgtaataaaaaagtaagtctgaattatggagggtgacagtgtcggataatgcagggaagtgcaaagaatttgtaaatattgcagatgggggcgcagagacgcccccgatttaccatcaagcgatcgcgttctcttccagttcacgcataaactggcgtacccattcgatacgcgttttccgctcgctcaaatcctgaataaacttcagacgcgtcggaccatcaaggcggtaatgctgcggctgtttttgcagcaaaccaatcaaccaggctggattaacgtgattcttctcggcaaattcgatcacgccgcctttctcattaccttccagcttcctgatccccagtttctgcgcttgctggcgcagacgggcaatatccagcagggtacgcgccggatccggcagcaggccgaagcgatcgataagctcgactttgatctcttccagttcgttttccgttttggcgctggcaatacgtttgtagaacgacagacgcgtgttcacgtcagggatgaaatcatctggcaatagcgacggcatccgcaggtcgacttctgtttgctggctggtgagatcttccagcgacggctcgcgtccggctttcagcgcatcgacggcgttttccagcaactccatatacagcgagaaaccgatggtttccattgagccgctttgttcttcgccaagcagttcacctgcgccgcggatctccagatcgtgcgttgccagcgcaaaacctgcaccgagatcttccagcgaggcaatcgcttcaagacgtttttgcgcatcggtagtcatcgcttttggatgcggcgtcagtagccatgcatatgcctggtggtgaagaacgcccgacgcgaccgcgcaactggtgcaactgtgccagaccgaagtgatccgcgcgttcaatgataatggtgttggcggtaggaatgtcgatcccggtttcgataatggtggtacaaaccagcacgttgaaacgttgatgatggaaatcattcatcacccgttccagttcgcgctcacgcatttgcccgtgaccgatggcaatccgcgcttcaggtaccagttctgccagccgttcggcggctttctggatgttttccacatcattgtagagataataaacctgtcctccgcgcaaaatttcacgcaggatcgcctcccggaccaccagactgtcatactcacggacaaaggttttaactgccagacgacgggcgggcggcgtggcgataatcgacagatcgcgcattccgctcattgccatattcagcgtacgtgggatcggcgttgcggtaagcgtcagaatatccacgttcgcgcgcatcgctttaatgcgctctttatgacgcaccccgaagcggtgttcttcatcgacaatcagcaggcctaaatctttaaacttgacgtcactttgcagcagtttgtgcgtaccgatcagaatatcgattttcccttccgccacttccgcaaggatttgcgtctgctctttggcgctgcggaaacgggagatcatttcgatacgtaccggccagttggcgaaacggtcgcggaagttgtcgtaatgctgctgcgcgagaagggtggtaggcaccagcaccgccacctgtttgtggttatctaccgccaggaaagcggcgcgcatcgccacttctgttttaccaaagccaacatcgccgcacaccagacgatccattgccagcggctgacacatgtcgctaagcaccgcattaatggcctgcgcctgatccggcgtggtttcaaacgggaagctgtcgcagaataactgatactgctcgcgatcgtgtttaaacgcgaagccctctttggcggcgcgttgcgcgtagatatccagcaattccgccgccacatcacgcactttttccgccgctttctgccgtgcgcgtgaccaggcatcgccaccaagtttatgcagtggtgcgttttcttctgcgccacccgcgtaacggctaatcagatgcagtgacgacaccggaacatacagtttggcgtcgttggcataggtgagcatcaaatactcgccagtaatgcctccagcttcgagcgtggtcattccggcataacgaccgacgccgtgctccagatggaccaccggctgaccaatatgcagctccgcaaggttacggatcagtgtatcggggttgatggcgcggcgagaatcctgacgacgacgggcaacgcgttcaccgagcagatcgctttcgcaaatcagcgccaggttacgcatcgtatcgacaaaaccatgttcggcagcgccaatcatcagataacgcccacggtcgctggcttcatcaagacgcataatgcgttgcggagcaattttaattcgcgcgagcagttcacccaacgcttcacggcggccttcactttctaccgagaacaccaccggaccgtcgaaagactcgaggaacttacgcagcgcatccagcggcgctttttgttgtgcctgaatggccaggtctggcagtttctggaaacctaaattggcattcgctgcttttgtcggtaaatgttcagtttttagctgcacacggggccagtttttcagctctgagaagagctcatccacccgcagccagagcgattgtggtggcaacagtgggcgcattgggtcgacgccgcgattctcaaaacgcgccagcgtgtcagcctggaaacgttcggcactgttttccagatcgccagtattcaccaacagcgtattggcagggaaataactgaacagtggcggcagcggttcgctgaagaatagcggctgccagtactcgatcccggcaggtaatgtgcctttactcacttgctgataaatatgttccgggtcgcgcttcacttcgaaggtatcacgccactggctgcggaacagttcaattgccgctttatcggtaggaaattcgtgcgcgggaagcagattgatctcttctacttcctccagcgtgcgctggctatcgacgtcaaacacccgcaggctgtcgatttcatcatcaaagaaatcaagacgataaggcagctcactccccatcgggaagagatccagcaacgcgccgcgcgtggcgtattcgccgtgctccatcacctggtcaacatggcgataaccggcgctgtccagttgggttcgtaatgcatctcgtgacaggcgctgaccttttttcatcaccagcgcatgaccgtggagaaagctgtgcgggcaaacgcgctgcataagcgtattcaccggaacaatcagtacgccacgctgcatggtcggtagctggtaaagggtggaaagacgcgaggagataatgtcctgatgaggcgaaaaactgtcgtaagggagggtttcccagtccgccagattcatcaccatctgatcggtgaactggctgatttcatcatgcaaacgcagagcattttgcatatctggtgcaatgagtaccaccggaccggcgtgacgttcggcaatttccgctaccagcgtcgcgcaggcagcgccggttaactcgcccagcagacgctgctcacccgctttgacgggcagcgtataacgatattgttcaggcataacggttgtcagattctcgttaggatatgcctcaacatatgagggcatatctctgataagcaatgctgttcattatccgtaatcggcatggtttagcaaattgaatcgccccggctggggcgatggcttagcgggagtaactgacggtagcgggcagagaaggcggggagaacaacagatcgctgaatgcgcgctgtgaaagttttcttaccagcaagcccgcaacagtacaaatcaacaaactgacaaaggggtaaatcagcaggagcgtcagttcgacttgcggcgaccagcgtaccgcgttcatttgcggaatcaggcttaagctgaatatttctaccagaatgcgatgggtggtatagatagcaatggtgttggagccaatcacattcagcaggctggaggaacgcataccgaaacgctgctcgtactgataaaatagcttcatgattaccacaatcgataccagcgacaacagcagcgagatattaaacaaccaggcaccgaccgccagaacggtcagcaaagaagccatcagcagatggcggcgcaacggtaccgctttaacacaggtcattaatgttgcgccaaaccatgcgccaaggctgtaataaggcaaattgcggatcacactgttcattccccaccacggtgtgggtacgaaattaacagccacactcatcagtacaaacagaacaaataacggcagggccaggcggttaaaaattttacatatcacgaaatagacaattaacgcatacagataccacaagctggtgctggcggtgatcatcccgtgcaggaactcaccggtggaatcggcataagcggcattggaggcattgcttaaatcgcgctcaggtgccagccactggttcagcgcacttaacgccagccactgcaccacgccccaaagcgccagcacccagaagatgttccagatgcgtttatcgagacaatttccccacggtacgctgtcgatatagcggcgaatcaaatagccagagataaagaaaaaaaccggcatacgaaagggtgcaaggtaaagattgaaatagatccagcatttgctcaggacttctgataacggatgctggaaagtggtcagatgcggataaaaggtaatgaccgagtgataaatcaccaccagacaaatacataaccctttgatctggttaatccatagctctttttgtttcatcaggacaacacgctctttttatttaacatgcggttgatcctgcggggcgagtcgcgtggtgtaatgcgtatctgtctgtatttggttatttttcagataaagatcaggccacatggccgatgataaaatgaggcactttagccgattgatttgccggtacttttcagattagccctgacgatcacttacagttcagacgtttacccatcctgctttcgcttatatactcgtgtctttgctacagcaaccagacggatttcatgtaccaacctgtcgctctatttattggcctgcgttacatgcgtgggcgtgcagcggatcgcttcggtcgtttcgtctcctggctttctaccatcggcattaccctcggggtgatggcgctggtcacagtattgtcagtgatgaacggctttgagcgcgagctgcaaaacaacatccttggcctgatgccacaggcaattctctcttctgagcatggctctcttaacccgcagcaactcccggaaacggccgtcaaactggacggcgttaatcgcgtcgcacctattactaccggtgatgtggtactgcaaagcgcgcgcagcgtggcggtcggggtgatgctgggtatcgacccggcgcaaaaagatccactaacgccgtatctggtcaatgtgaaacaaactgacctcgagccggggaaatataatgtcatcctcggtgaacagcttgcctcacagttgggcgtcaatcgcggtgatcaaatccgcgtgatggtgccatctgctagccagttcacgccgatggggcgtattccaagtcagcgcctgttcaatgtgattggcactttcgccgccaacagtgaagtcgatggctatgaaatgctggtgaatattgaggatgcctcgcgtctgatgcgttatccggcaggcaatattaccggctggcgtttgtggctggatgagccgctgaaagtcgactcattaagtcagcaaaaactgcctgaaggcagcaaatggcaggactggcgtgaccgtaaaggcgagctgttccaggccgtacgcatggaaaaaaatatgatgggcttgctgctgagcctgattgtcgccgttgcggcgtttaacattattacctcgctggggttaatggtgatggagaagcagggcgaagtggccattcttcagactcaggggctgactccgcgtcaaatcatgatggtctttatggtgcaaggggccagcgctgggattatcggtgcgatcctcggagcggcgcttggcgcactgcttgccagccagttgaataatctgatgccgataatcggcgtcctgcttgatggcgcggcgctgccggtcgctatcgagcctttacaggtcattgttattgcgctggtggcgatggctatcgcgctgctgtctacgctttacccttcctggcgcgctgccgccactcaacccgctgaggctttacgttatgaataagatcctgttgcaatgcgacaacctgtgcaaacgctatcaggaaggcagtgtgcaaaccgatgtactgcacaatgtcagtttcagcgtgggcgaaggtgaaatgatggcgatcgtcggcagctctggttccggtaaaagcaccttgctgcacctgttaggcgggctggatacgccaacctccggcgatgtgatctttaacggtcaaccgatgagcaaactgtcgtcggcggccaaagcggaactgcgcaaccagaagctgggatttatttatcagtttcaccacctgctgccggattttaccgccctggaaaacgtggctatgccgctgttgattggcaagaaaaagcccgctgaaatcaacagccgtgcgctggagatgttaaaagcggtggggctggagcatcgtgcgaatcaccgcccatctgaactttctggcggcgaacgccagcgtgtggcgattgcccgtgcgctggtcaataacccgcggctggtactggcggatgaacctactggtaacctcgatgcacgtaacgccgacagcatcttccagttgcttggggaattgaatcgcttgcagggcaccgccttcctggtggttactcacgacctgcaactggcgaaacgtatgagccgccaactggaaatgcgtgatggacgtctgacggcggaactgagcctgatgggggcggagtaatggcgatgcctttatcgttattgattggcctgcgttttagccgcggacggcgacgcggcggcatggtgtcgttgatctccgtcatttctaccattggcattgccctcggcgtggcggtattgatcgtcggcttaagcgcgatgaacggctttgaacgcgaactgaataaccgcattctggcggtagtaccgcacggtgaaattgaggcggtagatcagccgtggaccaactggcaggaagcactggataacgtgcagaaagtgccgggcattgccgccgctgcgccgtatatcaatttcaccgggctggtggagagcggcgcgaatctgcgcgcaatccaggtgaagggcgttaacccgcaacaggaacagcgtctgagcgcattaccctcgtttgttcagggggatgcctggcgcaattttaaagcgggcgaacagcaaattatcatcggcaaaggcgtggcggatgcgctgaaagtgaagcagggcgattgggtgtcgattatgatcccaaattcgaatcccgagcataaactgatgcagccaaaacgtgtgcgtttgcacattgccggtattttgcagttgagtggtcaactcgatcacagttttgccatgatcccgctggccgatgctcagcaatatcttgatatgggttccagcgtgtcaggtattgcccttaaaatgacggatgttttcaacgccaataagctggtacgcgatgcgggggaagtgaccaacagctatgtttatattaaaagctggattggtacttacggctatatgtatcgcgatatccagatgatccgcgccattatgtatctggcgatggtactggtgattggtgtggcctgtttcaacatcgtctccaccttagtgatggcggtgaaagacaagagtggcgatatcgcagtattaagaacgctgggggcgaaagatggtttaattcgcgccatctttgtctggtatggattgctggcagggctgttcggcagcctgtgtggtgtggttatcggcgtggtggtttcacttaaacttaccccgattattgagtggattgaaaagctgatcggtcatcagttcctctccagcgatatctattttattgacttcttgccatcggaattgcactggctggacgtcttctacgtactggtcacagcattgttgctgagtcttttggcaagttggtatccggcgcggcgcgccagtaatattgaccctgcgcgagtccttagcggccagtaaaggcagtacattaaaacaaggagcggcaatgtattacgggtttgatattggtggaacaaaaattgcgcttggcgtgtttgatagcggtcggcagttgcagtgggaaaagcgggtgccgacaccgcgtgacagctatgacgcatttttagatgcagtgtgtgagctggtagctgaagctgaccggcgttttggctgtaaaggttctgtcggcatcggtattccgggaatgccggaaacagaagatggtacgctgtatgccgccaatgtccctgctgccagcggtaaaccgctgcgtgccgacctgagcgcacgtcttgatcgcgatgtacgccttgataacgatgccaactgttttgccctttctgaagcatgggatgatgaatttactcaatatccactggtgatggggttgattctcggcaccggcgttggcggcgggctgattttcaacggtagaccaattaccggtaaaagctatattaccggcgagtttggccatatgcgtctgccggttgatgcgttaaccatgatggggctggatttcccgttacgccgctgcggctgtggtcagtatggctgcattgaaaattatctgtctggtcgcggttttgcgtggctgtatcaacactattatcatcaaccgttgcaggctcccgaaattattgcgctttatgatcaaggcgatgagcaggcaagggcgcacgttgagcgttatctggatttattagcggtttgtctgggaaatatcctgaccattgttgaccctgacctggtcgtcattggtggtggcttatcgaatttcccggcaatcacaacgcaactggcggaaaggttgcctcgtcatctcttacctgtagctcgtgttccgcgcattgaacgcgcgcgccacggtgatgcgggaggaatgcgtggtgcggccttcctacatctaaccgattaaacaacagaggttgctatgctgtcgcgtcggggtcatcggttaagtcgttttcgtaaaaataaacgccgcctgcgcgagcgtttgcgtcagcgtatttttttcagagataaagtggtgccggaagcaatggaaaaaccaagagtactcgtactgacaggggcagggatttctgcggaatcaggtattcgtacctttcgcgccgcagatggcctgtgggaagaacatcgggttgaagatgtggcaacgccggaaggttttgatcgcgatcctgaactggtgcaaacgttttataacgcccgtcgtcgacagttgcagcagccagaaattcagcctaacgctgcacatcttgcgctggcgaaactgcaagatgctctcggcgatcgctttttgctggtgacgcagaatatcgacaatctgcatgaacgcgcaggcaataccaatgtgattcatatgcatggggaactgctgaaagtacgttgttcgcaaagtggccaggtcctcgactggaccggagacgttacgccagaagataaatgccattgttgccagttcccggcacccttgcgcccgcacgtagtgtggtttggcgaaatgccactcggtatggatgaaatttatatggcgttgtcgatggccgatattttcattgccattggtacttcggggcatgtttatccggcggctgggtttgttcacgaagcgaaactgcatggcgcgcacaccgtggaactgaatcttgaaccgagtcaggttggtaatgaatttgccgagaaatattacggtccggcaagccaggtggtgccagagtttgttgaaaagttgctgaagggattataaagcgggaaaaattgcctgatgcgctacgcttgtcaggcctgtgaaggggcgcaattaattgaatttgcgggttttgtgggccggataaggcgttcgcgccgcatccggcataatacatgcgaactttactgcctcttttaccgtttactcgtccatagtaacgcggcaataaacgtacagacaccaatcagccctgcccagagtggcgatattctggtaatcgcaaagctgttatcgatatacaaacataaagcctgataccccatattggcaacagccatcgccactgcaaattttaacgcataataaaggcgcgttgtgtagttaaaaaatgcagcaaagacgatgaatgcaactgcccaggcaaaaaggcctaatgtcgtggtactgccgggtggatcattttcatgctgttgtccgggatgcggataatatgtcagtggtggcgtcggttgttttaatatctgtgcttgtaaaacagccaatgcattattgataccctgataccagagatccgcatgtaaataagccagcgtgtgattttctaccagaaggccgagatgtttatcgtccatactgctttcgacctggccgttggttatcataattaaccgtggctcgcgggtagtaaagagtaacagaacacttccttttacattactcattgaagatgccgcatgcgccagcatcgctttgccattttgcctgagactggcttcattattaatgtcgggtaaaaccacaataaacggtgcaactccggtttgttggcgaaaaagttcggctttatgcgcgatctcttcagcatctggtacagtaccggtaacatctgtaaaaagagtcttcattattggaattaagggcttactgattgccgtcagaggcaggaacatcagtaaactgagcagtatcatgatttttttcatgggcgggacttccgtttcctgcgtgtctttttagaggagggcatactgattaataaaccgacggagataaaaataacgcccataatgccgataaacccccatttaaaaaaattaacccacgggttatttatctcagccttttcaggatgtcctggagaataataaacattaactttatcgccttcgctgtcttcataaaaatcgctgccgatactcgaattgaaaattagcgtgtaatctggcgtcggtcgaaaggcaacgacgggataccacgaaccatttttacccgtgcgatgagaatgactggagtgccagacggtatcaacaatgacgccttcagtatgaatcgcgtctttgctataggtgaactggttataaaagataacaacagaaatgaggatcagtaccagaccgataccgaagaatatacgaaagaaaactctactgtcctggctcattagccacatccttgctaaataaaaaacgggcggtaataccaccgcccacttgctgaattaacgtcctgctttcagcttctgataatactcttcataaatgctgctggcggagcctacgtcattttgccattcaccatttttaatggtttcagcatccgggtagagcgttttatcgttcgccacttccggacttaacagcttacgcgccgcaaggtttggcgttggataaccgatagtttcagcaacctgttttgccacatccgggcgcagcaggaagttgatcaatttcagcgcgccttctttgtttttggcatttgccgggatcgccaggctgtccatccagaaaatgccgccttctttcggccataccacatcaattggcgtacccgcctggcgtgcaacgaaagcagaaccgttccagatcatgccgaggttaacttcgccttccatatacgggttagcggggttatcggagttaaacgccgcgacgtttggcatcagttttttcagctcgttgtatgcagcttcaatctctttcggatcggtggtgttaccggagtagcccagcttacgcagcgccatctggaacacttcacgggcatcgtcggtcagcagcaggctgcctttgtactcaggcttccacagatcggcccagctggtgacagatttcggatccaccgcatcaccgttaacgccaatcgccgttgcaccccagatatacggaatggaatagtcgttattcgggtcaaacggcttgttgagcatgtctggatcgaggttgctgaaattgcttaacttcgacttgtcgatcttctggatcatcccttctttacgcattttatcgacgtaataggttgaaggaaccaccaggtcataggcaccgtctttgtacgttttcagcttcgcgtacatggtttcgttcgactcgtaagtcgaatagataaccttaataccggtttctttggtgaactgttcaagcagtcctggcggcacgtactcggtccagttgtagaaatacagcgtgttgttgtcatcggcgtgagcggcgctcatgcccagtgccagagcacccgccgcgagcaggtggcgtgaccattttttcatttaacgtcccctgtgttacctttcgttttatcacgagcaataagctggctggcaattaccatcaccagcgacagcaccagtaatatggttgccagcgcgttaacttccggcgatacgccgactttgaccatcgaataaatttttaacggcagaatttcataactcggcccggtgacaaacgaagaaaccaccacgtcgtccatcgacagggtaaagcttaacacccagcccgccgctaccgctggcattgccagaggcagaatgatttttcgcagaatggtaaattcgctggcaccgagatctttcgccgcttccagcattcgcacgtcaaaacctttcaggcgcgaatacactgtcaccaccacaaatggcaggcagaaggtgatatgcgagaacagcagcgaccagaagccaagctgaatacccagcagcataaacagcaccagcagcgaaatcgccatcacgatatctggtgacatcatcaccacaaacagcattccgctaacgaacggcttaccacgaaagcgataacggtacagcgcaactgccgtcagtgaaccgataagcgtagcaaacgtcgccgaaaacaccgccattgttagtgaatgctgcgctgcctgtaacaggctgtcgttgttcatcagcaggctataccatttggtggtaaaaccctgccagttgatgccaaagcgcgagctgttaaaggagttcacaatcaaaataatgattgggatatacaggtacgcgtagatagcggtcataaaaccgccgcgaagcagtcgaccgatcattcgagttccaccttcttattcataaggcgctggcgtgggttgaccgaaatatcaaagtaccactgaccgaaccacagaaagcgggtaaggcgctggcgtgggttgaccgaaatatcaaagtaccactgaccgaaccacagaaagcgggtcagaggtcaaaaaaacacggtgttttccgtgtgctgccggtaaaaggcgcgtctgtctatggcaagccggtgatcaccatgccgaaaacccgcaatcagcgtgtgaagtggggacggacaccgcaaaagaaattctctatgcccgtatgaaagccgagcccacgcctgcggatgaagccacgtcgtatgccatccgttttaaggataatccgcttattaatattctggagaagttctccagctggtatgacacgaataacgtgacactgggcggtgtcaaaattccgcaccttttccctgccgccaatgagtcgtggcgctattttatggggcggcgaaaatttattgcgtcccggctggccacgcagatgttttcctgctggctggaagaggcacttctaatacgaggtttttacaatatggtgacgaaaaccatcactgaacagcgtgcggaagtacgtatttttgccggtaatgatccggctcataccgccacaggcagcagcgggatttcctcgccaacaccggcactgacaaaacaaggcactgaaagacgggaaaatcctgcaggcggattacaacacgctgatggcggcggcgaaaaaggattatgaagcgacgctgaaaaagccgaaacagtccggcgtgaaggtgtcgaagcatgccggagcgaatgagaaaatcagccagcagcgccgggatttgtggaaggcggagagtcagttcgcggtactggaggaggcggcgcaacgtcgccagctgtctgcacaggagaaatccctgctggcgcataaagatgagacgaaggcagtgaagaaggtaaaacatggaaatggaatcaaattgaccatgtaacgccgcgggataaggatcaaaaacatcatggctaattttatgtttaatttttgattccccagcccttgtcgatgccgcgttcaggctagcttcgttcaaatccattaaagatatcagactgctctcaggtacgtgagtaaggtaaaacccagttccaacgccaatatccagatggttgttacctaaatgttccagaaagtgtggaagaaggtgttcctttgtaggacatccccatgcaagccgatttgatactcccaaaacccaccagtcataaagctttagcaccttcttattcagcagacgagaagcgcgccagtaaaccagcaacatcaggcccattacgatagtcagcgtaatgctggtggctgcaccaaacggccagtcacgaatattgaggaactgtaccttgatgacgttaccgatcagcaggtttttcgcaccgcccatcaggtcggacacatagaacaggcccatcgctggcagcatcaccagcagacatccggcaataattcccggcatcgttagtgggataatgatgcggataaaggtctgcaacttgctggcaccgagatcgcgcgccgcctcaagcaacggcttatccagtttttcgatactggagtacagcggcatcaccataaacggcagcagaatgtaaaccagaccgataatcaccgcactaggcgtgaacatgatgcgaattggtgtatcgataacgcccagccagagcaaaaactcgttgagatagcctttggtgctgaggaaaattttcagcccgtaaatacgaatcaatgagttggtccagaacggaacaatcagcagaaacagcagcagcggacgcaccttgtgtggcagcttcgccagaaaccaggcaaaaggatagcccagcaccaggctggcgagggtggcgatcagcgccatattcagcgagtgcaatagcacttcaaaatagagcggatcgagcagacgcgtgtagttatccagcgtaaagaccattttgacgaaactggcgtcgtcgcgggtcaaaaagctggtgccaatgatcatcaggttgggcagaaagacaaacaacacaagccaaccgacaatagtgacaatcactacattctggaacttacttgtgttcttcatcagccagtacgacctcccagctttctacccaattaatggccattttttggtcgagagagtggtcaaagtcaggatcgtcttcattgaagaattcgctgaccatcaccatcttgccattttccagctcaacaaccgactccagcgtcatgcctttgtagttacgctcgcgaacgtaaccaatcagcccttcggcgtggttgtcgtcgttaatctcttcaacacgtaagtcttccgggcgcagcagaacatgcagtttttgccccggttcaacggcgaagttaacgtagatattacattcgcggccttcaacgttggcgagtacgcgctgctcgtcgagacgttcgatgacagtggcgttaaacatattgatttcgccaataaacccggcaacaaacaggtttttcggctcttcgtagatttcacgcggcgtgccgtcttgctcaatgcgaccatcgcgcatcaccacgatcctgtccgacatagtaagtgcttcttcctggtcgtgagttacgaacacgaatgtaatgccaagcttacgctgtaacgctttcagctcgttctgcatttgcttgcgcagtttgtaatccagcgctgagagcgactcatccagcaacaacagacgaggcttgttaaccaccgcgcgggcaatggcgacgcgttgctgttgaccaccagagagctgatgcggtttgcgttgagcgaaggtttccagctgcaccatccgcagggcttccatcacgcggggcgtaatttcagcagcgggggttttttgcatgcgcaacccaaaggccacattttcgaacacggtcatgtgggggaaaagtgcgtagctttggaaaacagtgttcacgtagcggttttccgccggaacgtgggtgatgtcctcgttatccaacatgatgcgtccggaatcaacagtttccagacctgcaatcaggcgaagaacggttgttttaccgcagccagaagggccaagcagcgtgaggaactcgccattgttgatagtcagatccagctggggaatgacctctttaccatcaaagcatttgcgaattcccgccaattgcaccagcggtgaaagcgaactcggttgtttattcaattttttactctgtcccatgtaaacgcaacggatggcttaccgatgcggggtttgtggttaaccaccttggtgactcttaatgagggcggtaattctacggcaaaccgcttgaatcgccaatctttgttgtgaattactggcttagctttatattcattaaggtaatgctgataaatattcccgcttgcaggggtaaaagtgacctgacgcaatatttgtcttttgttgcttcttaataatgttgtcacaaaaagtgagggtgactacatggataaactacttgagcgatttttgaactacgtgtctctggatacccaatcaaaagcaggggtgagacaggttcccagcacggaaggccaatggaagttattgcatctgctgaaagagcagctcgaagagatggggcttatcaatgtgaccttaagtgagaagggaactttgatggcgacgttaccggctaacgtccctggcgatatcccggcgattggctttatttctcatgtggatacctcaccggattgcagcggcaaaaatgtgaatccgcaaattgttgaaaactatcgcggtggcgatattgcgctgggtatcggcgatgaagttttatcaccggttatgttcccggtgctgcatcagctactgggtcagacgctgattaccaccgatggtaaaaccttgttaggtgccgatgacaaagcaggtattgcagaaatcatgaccgcgctggcggtattgcaacaaaaaaacattccgcatggtgatattcgcgtcgcctttaccccggatgaagaagtgggcaaaggggcgaagcattttgatgttgacgccttcgatgcccgctgggcttacaccgttgatggtggtggcgtcggcgaactggagtttgaaaacttcaacgccgcgtcggtcaatatcaaaattgtcggtaacaatgttcacccgggcacggcgaaaggagtaatggtaaatgcgctgtcgctggcggcacgtattcatgcggaagttccggcggatgaaagcccggaaatgacagaaggctatgaaggtttctatcacctggcgagcatgaaaggcactgttgaacgggccgatatgcactacatcatccgtgatttcgaccgtaaacagtttgaagcgcgtaaacgtaaaatgatggagatcgctaaaaaagtgggcaaagggttacatcctgattgctacattgaactggtgattgaagacagttactacaatatgcgcgagaaagtggttgagcatccgcatattctcgatatcgcccagcaggcgatgcgtgactgcgatattgaaccggaactgaaaccgatccgcggcggtaccgacggcgcgcagttgtcgtttatgggattaccgtgcccgaacctgttcactggcggttacaactatcatggtaagcatgagtttgtgactctggaaggtatggaaaaagcggtgcaggtgatcgtccgtattgccgagttgacggcgcaacggaagtaagcaaaaagggatgcggcatgtgatgccgcatccggcttaaatccaaacttacccttcgaagaaccagtatccgctattgaccagcgccgcgagcatcgcgaggaatgacggatcttccagcgcatcgccaaaattctccgcggtcagcgcaatgttgctggcgagtgcatccagtgccggacggtgcggggaatcgattttctcaccattggcatacacgtcgtcgccaatgcgcaatacgcgcagaccccccaggcgcaccagcacatcaccttgtttcagcgcatcgtagatttcatccggctgataaggcggctctggcggcgcgatatccagttcatgacgtgactgggatataaactcgccaaaccattgcttaaagtgttccggctggttgatcaattcgagcatcatctcacgcagtttatccatctcttgcggcagaacgtccgcaggatgagcgcgaggtggaacatcaggatcgctgtagtagttgccgcccagttcacgttgcagcacataatcggcaaatccgctaatcagttcccgcgtattcggcgcgcgaaaacccacggaatagttcatcgcattttccagcgcgtagccttcatgcgggaatcctggcggaatataaagaatatcgccaggctccagctcttcatcgatgatggcttcgaacggatcgacctgtaacagatccgggtgcgggcagtgctgtttcatttgcagcttttcacccactcgccagcgacgacgaccggtaccctgaatgataaacacgtcgtactgatcgagatgcgggccgacgccgccgcccggtacagaaaaagagatcatcagatcatcaatacgccagtccggtagttcacggaacggtcgcattagcgcagcggtcggctcatgccagtggttcactgcttgcactaacaatgaccagttagtttctccgagatgatcgtagctttcgaatggaccgtggctgacctgccatttgccatcctgatgactgaccagtcgactgtcgacttcgctttccatcgccagacccgccaactcgtctggagagattgggtcaataaaattattaaagccgcgttttaacaccaccgggcgtttctgccagtgacgttcaagaaaatcgggccagttaagagtgagttggtattccatgttaagcatccacaggctggtatctgcaaccgattataacggatgcttaacgtaatgcgtgaagtatggacaagcacagcagcgaacgaggaaggattcgagccggacgtaatagaggcggcacttgcccacgtcgacaccaacgaagttagacgggcatacaaccggagcaactacatagaaaaacgcatcgtgctgatgcgctggtggggcgaatttgtcgaggctgcggcgacgggcgtaaccctcgccagtggtaaaaggggtatccgagccgtgtagctgtacagaaaaccagtaaaaactacgaaaaccatgtaaaaccgtcgtataattgcatcaaatttaacgacaaggccgtgaaacatgaaaccgttaagatgcaaaaaaatatcagatgcaattgcgacgggctgcaactggccctgatggttcagcatgaattttggtcaacctacgatccggaggacagaacgacggccccatcaaaaaaacaggtagtagattttctggtatcccgtggcgcttccagaaatctggcggtaagtattgataaggtcgtacgtccggcatctatgaagatcggaggcaggcccaaaaaatggcggtaacaatcctggaagcggcagaaatgccgctttttttataattccatttcaaatcatcaatataaaaacggtgtataccgtttaaaaacggtgggaactgtttttacccatatccgatgatttaccgtatttgtcaccggaatacaccggattcacaaggtaaatcacgatggaagcaatcagaaaaattatctttcgccaggaagtaaaaaaaattatccacatcaaggcagacagcacgctgcaaagcatgatcaacgccggagaatttccgcagggttttcgcgttggtttacgccgtcgcggatggtatgaggatgatgtgttggcctggcagaaagaacgcgaacaggaagcacgcggaacggctgcttaacgggtatcacagatatgacaaacacgaaaaaagcggccccgatatggagccgcctttctgaacaattaacccgctgcgccttatgtgtatatgatcccaaacataagcacggggatgatagccgctatcaaaaagtaacgggtattttatcaaaaaagtaacgggcggctggtgggcaatgcaatcagtctggttcagttcgttgccatacctgcaatgagcgcttttccctgtattctttaaggaattgctcaagggcaaaagcacatggcgcgaatctttctgattcatgctctatctttctgcgccgtcttttccgtgccggtgataatgttttggtcaattctttatcggtcattgtgttgtcctgcatagcaatgcgccgtaataccttacaccacggcgctgatggtgattactctggttctttggtcttgcggcgctggagttcttcacgtgcgacagtgacgagctgcccgatctcctcggcggctttgattccgagtttttccacctgcgccagtgcatcgtgcgaagaaatcagggggttttctccgcttccttctgcctggcggcgggcgatttcaccgcgcatggcggttactatgaatccggcgttgctttcaccgtccagttttacggattccatgccttcaataacatcatgcgggatccgagctgtcagtgattgtgattttgcgttttttgaacctgtagccatctgtaatcctctcaatgaaagtgtaagacaatatacacataaaaagtcttacataaaagcattgacatgtaagccacctataaataaagttacttacaccttgttaatgcaaggtgcagaaacgacgaaaccccgcactgtaggagcagtaacggggcttctaaccaccaacgatagcaagattatcgaggcagctatgagaaattataccatacacccgcaagggcgggactcgtacaacctgaataaatacatctggcgttttatcgccctgagcacggcacaaccgcgcgtgattaccatcgaggccaccagcgaacaggaagcgcgtcagcaatctccggctggctgcgtgatggtatttgctgcccgtattcgtcagggggtaggcttatgagccaggaaatcacactacaacaggcagcagaacgcgcccaccaaatcgaagttatttgcgcactggcagaggattaccctggcatgatgaccgacagcgaatcaggggcaatcatcggcttacttaaacgccttagcggtgaggtctgcgtattcctgagcgatgaacaggaaagaagaacgcttatttctaacgaaaaaaaatgcggaggggtacatgtgcaataaaaccacaccggacgcagcagccgccgcgctcactacgctgatgcacgcgcttatcgatattgaatgcactgcagagcttgcgcagggagaagaacagaaagaccggacacagttcgccctggaatgtatccgatacatcgcaacacggtcgctgaatgacgctaaaaatattcttgttgctgattgtgaaaatggggggggttatgcgtgatgatcgttttaattccctgaaacaggaattttccggcgttcctgatgatgcggctgatgcgctttcgtcaatgccagaacttattagagcggcttttttcttactttccacgagagaatataaatcaacggggcttgatgtactgaatatcgccgccgattatgctgatttcgtgacagaggttattttaagaaaaacgacggacggggattaatatgcgtgatatttaccacgaaacaatagaccgcgcatttcttgcactttctcacagtgaaaacatgctggaaatattgcgcatatggcttgaaacacttggcgacaatgaacgcgacaaacaaaaatcaagaattgccacggcattaataacgcttcttgagcctgtaataatggaactgcaagaaatagatctattgcacgatagatataaagaacagcacaccggagaataaaaataatgaaacttaaatattctggcttaactgccagtggcaacactcaccctaaatttacgcgcggcgatatttaccgcgaccagtacggcggcacggtaatgattaagggcgtggcgggacggtgcgtaacttaccgccgtgaaggttacgaatatgattgcgtgatgcctgtttatcagttccggcgtgatttttctctggtacagaccgcgccgcataacgtgcccaccagcaacgccagggcacgggcaaacatccagaagctgaaaaccatgattaacggattcaggggtaaaaaatgaaactggcaccgaacgtaaaacagcagtcacgcggcataaaacacaaaggaacagaagtcattatttttgcgggtagtgatgcctgggcacacgcgaaacaatggcaggaacatgatgcgcgtatggccggagataatgagcctcctgtgtggcttggggagcagcagttatcagaactggataagctgcaaattgtgccggaaggcagaaaatccgtgcgcatattcagggccggatatcttgcgccagtaatgataaaggcgattggtcagaagctggcggcggcaggcgtacaggatgcaaatttttaccctgatggtatgcacggtcagaaggtggagaactggcgcgaatatctggcccgtgagcgccagaatctttctgatggtctggtcattgagcttccggtaaagcaaaaggcgcaactttcgcagatggcggacagtgagcgcgcgcagctgcttgccgatcgctttgatggcgtttgcgtacatcctgaaagtgaaatcgttcacgtatggcgcggcggggtatggtgtccggtcagcacaatggaacttagccgcgaaatggtggcgatctattcagagcacagggccactttcagcaagcgcgtaatcaataacgccgtggaagcgttaaaagttattgccgaaccaatgggcgagccgtccggcgatttgctgccgttcgccaatggtgcgcttgacctgaaaacgggggaattttccccgcacacgccggagaactggatcaccacgcacaacggcattgagtacacgccaccagcaccaggggagaacatccgcgataacgcgccaaactttcataaatggcttgagcacgcagccggaaaagacccgcgcaagatgatgcgtatatgtgccgcgctgtacatgattatggcgaaccggtacgactggcagatgtttattgaggccaccggagacggcgggagcggtaaaagtacattcacacacatagccagccttctggcagggaaacaaaacacggtaagcgctgaaatgacatcgcttgatgatgctggtgggcgtgcgcaggttgtcgggagtcgtcttatcgtcctggcagaccagccgaaatatacaggcgaaggaacgggcatcaagaaaatcacgggcggcgaccccgtggaaattaacccgaaatatgaaaagcgttttacggcggtaatcagggcggtggtgctggcaaccaataacaatccgatgatattcaccgaacgggccggaggtgtggcacgtcgtcgggtgatattccggttcgataacatcgtaagcgaggcagaaaaagacagggagctaccggaaaagatcgcggctgaaatccctgtcattatccgccgcttgctggcgaactttgccgaccctgaaaaggcacgggctttactcattgaacagcgtgacggtgatgaagcactggcaataaagcaacagacggatccggttattgagttttgccagttcctgaattttctggaggaagcacgcggcctgatgatgggcggcggtggcgattcagtgaagtacacgaccagaaacagcctttaccgcgtctatctggcgtttatggcgtacgcaggcaggagcaaaccgctaaacgtaaatgactttggcaaggctatgaagccagccgcgaaagtttacggacatgaatatattacgcggaaagttaaaggagtaacgcagactaacgcaataacaacagacgattgcgacgcgtttttataatttgttgcaatggctgtctaccctgtctacctgagtaaagaaaaatacatttaattcagtgcattaagttaggtagatagcctttttttactgtctacccactatctaccctctctacctgattttacctgaatcagacagggaggtagacacggggtagatagtggataaaagcactctaccccgctgaaagccgcgccattactggcatgagggccactaaggtagataaggtagacaaggggaggcacaactcaaaactttttaaacgagggggtaaaaataaatatgcacacttcagggaaatttaataaatcactcaaaaaacgcagagacagaacagaaccgaaatatcgcgcgttagacatgacagagcacgctttaaaggtggcaatcagaacgatagaccgacacgtaggggaaggatacgcgaaggaacatcccgacctgataagcgcattcatgaccacagcagcggcaaactttgccacgctgacagaacgggagattgccgaagcggaacaggtaacaaccatcaacgttaaaaccggagaggtggaatcatgacagcacagatagccgcttacgggcggctggtggacgacccgcaggtaaaacagaccagcaagggcacaccgatgacgctggcgcgtatggcggtcccccttccgtgcagccaggcagatgacggaacggcgacgatgtggttatccgtcctggcatttggcagacaggccgaagcactggaaaggcaccgcaagggtgaactcctgagcgtggcgggcatttggtaagcaggccgggtaacatgcagatcagccagtggactgggcagaacggagaaacgcggcagggctggcaggttatcgcagacagtgtaatcagtgcgcgaacggcgcgactgggcggcaaaaaaggtcaacagggccaggctactgacgcgctgaacagggcaaaacaacaggcggggaatgatgatccgtacggggataacataccgttttaagcgacgagtgacagaagccggagcaatccggcttttttacgggtcctcctggcggggtgggcctgaacacggggcgggaggcgcggaaaaaagcgcatttttgtgattttatcgtcatcatcatcatgagcgtaatttattgtttttaattgttttgatgcaaaaaagatgatggttgtggttaattttcgttcgacatctttgcaggcagatagccggagcaatccggcttttttaaaaaaagcccgataaggtcagaggtggcttatcgggcttttgcatatgaggctttttggtgcactgacacacatgatcgggataatcatttcataatttgcaacgcaactcaacatcattgcacaaaatgcaatcatgattataatcagagctggatgaacatccagttatgattttttaagtcaaagaggaatttcttactatggctgaagagaaaaaaggcggtgtttcggtgtacataagccccgacatcgtgaaggcgctcaaggaacgccaccagcagaacgtaaaagcaggcattgcggcaggacttgatccgctggcgatggttgagccgtcaacaggctggcaggtacgctcctatttacgcgcggcgctgggcataaatcagactcatgggggtgaataatggcagtcaaagcaatggcacttaacacacaccagcttttcgcgtacctgaatcgcgaggatattgcggaatttaaatttagtccgctgtttaccgcgctgtttttcccgaacgtggcgacattcaacacgcaaaacatcatgctggataccctggacattgaagaagtcaccatgtcggcgttttgttcgcctatggtgggtagccaggttcagcgcgataaagggtacgaaaccagcacgattaaacctggctacatgaagccaaagcacgaaatcgatccaacgaaaaccatcatgcgcatggctggagaagatccggcacagcttaacgaccctacctatcgccgtatgcgcctgattactggcaatatgcgccgccagataaacgccataaaagcgcgcgtggaatggctggcggtaaatgcggtaacgaccggaaaaaacatcattgagggcgaaggcatagagcgctatgaaatcgactggaagataccggaaaaaaacatcatagagcaggccgacgggaaaaaatggtcagagcaggacaaagaaacccacgatccaatctatgatatcgaactatacgccgatcaggctggttgccccgcaaacgtcatgattatgggcgttgaggtatggcgaacgttacgcagctttaaaaaattccgtgagctgtacgatctttcccgtggttcagagtccgccgcagagctggcctgtaaaaacctgggcgaagtggtgagctttaaaggctatctgggcgatattgcccttatcgtctattccggcaaatacactgacagcgacggcacagaaaaatatttccttgatcctgatttgctggtcctgggcaacaccaacaacaaagggctggtggcctatggtgcgattatggatcaggaagcggtaagaacaggcgcaacgcaaaacatgtactacccgaaaaactggattgaggacggcgatccggcgattgagtacgtgcagacgcacagcgcaccgcagccggttccggcagatattcgcaaatttgttaccgtcaaaattgcttaacgggggattctatggacactccatacattgagttatttgcaggcagtcagcaggtatccacgacgctggtacattttgccgctgatgctggcgttattcaggaatttaccccgctgatgctggcggacaatggcgagtttaagccgtgggatggtcaggaatctggcaaggctgtttatctgacttcgtacctcgtggacacgtcaaagcagaaatcagcacagtgttacaagacggggatattcaatattgccgccgttaactggcctgagagcgtcgacaccgatgcgaaaaaatgcgccgcctttgcgggttctggcgtatccgttcagccgctggcccgataagcagggggaacgatggcaacgaatgaaagcatcatggcgctaccgctggcgagtaaatttaaagccgaagcgcgggcaatggctgacagaggtttatcaacctacgaggccgtatatcaactcaacaaactggaagagcaggacaagccgcgcgctgatgcgattatggcgcttcatgagcataaagactatcagccgctgttgcgtgcaatggcaaacgtgccttgtatcgatgttgatacggctaaaaacatcctgaacatgaccatagagcaggaacgcccgaaggttgcaccagagcttaccgcagcctttgaaaactttatggacatgcacagcccacaaaccgtatcagctggcatggcatacgatggcagaaacccaggcgatgacggcgacatcgatcgcatactgaaaaccatctgagacaaggccggagaaatccggctttttttagggtccttcccggaatatggacccgttacggggcggcgacctcgcggtttttcgctatttatgagctttttcaggggggtggtggtggttttgttgtttgctctatctttatgaatgaaaagggaaagatgcaaacaatacaccaacctgaagcagtaattaagttggtgtattaatgaaatcgcacctgatgaacaaaaaaaacatggcgaaaagctgccgtgtaagtgcgacagcgttcgacaagtggggagtgactcccgttgaacgtaaaggccgtgaggcgttttacgatgttgccagcgtgatagacaatagggttaacaatgcaattagccagcttacaaacgacaaaggcgatattgatgatgatgaactcttacgagtcaggatcagattactgacagcacaggcggaggcgcaggaacttaaaaacgagcgcgatcgcggtgacgtgattgatactgagttttgcctgtacgcgctttcaaagctggcgagtcagatttcatcaatcatggacagcctcccgcttactatgcaaaggagcttcccacagattacccccgccatgctggataggcttaaaagggaagtggttaaagcctgtaatgccagtgccagagttgccgacaacctcccacagatactggctgattacttgaaagaaacaaccggaaacgtaccggaaaagttgctacagaagaaaggcgagtaacagacgcgcaattattgaacaaaactgagaaacgacatgaaagcgtcataaatcgccattttagatgattaccgtgtcgtttctttttattgtgtatctatttaaaaacaaatagttatgttcgagaagtaccgacatgctttttccagaaaaattttcataaacagataaaacccgcgaggtcgccgccccgtaacgggtccataattccaggaaggacccgacgacaccagacaatcagaacgatgggtgcacaatgacagaagccgaaatactgggattaatccgccgtgctggtggaatcagccagcagactgacgaacaggccacgcagccggacagcgtgacagccgaaaattatgcgcgtgttgttgctgaggtgatgcgccgtgatggtatccagcttaatgatgtggatatgcgcaacatacggatccgcgttcttgaaatgctggcctacaatcgccgcgtggcactgtatcgggaaacggagaaaattacataccactggaagaagccggagcggttgcggcggtaactggttgatattttcgaaattcgccagcggcgaacatcggggaaaccagcctaacccgttgatattttcgggaacctcaaattgaggaggtcggaaacataacccgtcatattctggatgctgataattaccacgcagcccattaaggcctaacccgttgattctttcggacatatttattcatctttcggtgcagaatgctggcgaccaaaaatcacttccatccgcgcaccgcccagcatgctctctccggcgacgattttaccctcatattgctcggtgatttcgcgggctaccgccagccccacaccttgcccagggcgtaaagtatcaacccgttgaccacggtcgaaaatgacctctcgcttgcttaatggaataccggggccatcatcctcgaccacaatatagagatgctcgtcggtttgccttgcagaaatttcgacaaattcgaggcaatatttacaggcattatccagcacattacccatcacctcgacaaaatcgttctgctcaccaacaaagctgatctctggcgaaatatcgagagagatattgacccctttgcgttgatacactttgttcagcgccgaggtgagattgtccaacagtggggcgaccggatgcagctcgcggctaagcaatgtcccgccgcgcatactggcacgatgcaggtagtagccaatttgctgtgaaatgcggctgatttgctccagcattaccggctcagcatcactgacgctcatcttctcactacgcagagaacgcagcgtactttgcagcaccgccagtggcgttttcagactatgggtcaggtcggtgagcgtcgtacgatatttgtcgtaacgttcgcgttcactttttaacagtcggttcaggtttcgtaccagactggtcagttctcgcgttgtggctggattgagcaattcacggttatgttcttccagttcgcggacttcttttgccagggcttcgatggggcgtaaactccaccaggcggcgacccacagcagcgggatcactaacagcagattggctgagagcacatagataaaccagctccagaccatataggaactttttagctccaccggaatggtatccaccaccacaatggttaactttggcatccgcgatgttgccgggtagacgtttaccgccaccgagtgggtcatctccgcgtcgtcatcatcttcccgcacttcctgcaactgttgctgtatcgaatgatctccactcagcaagaggctggtatcgttaacatccgcttcaatttcatgaaaaccattcgatttcagccagtcaggctggatcatcttcatcagccagggcacgtcacgttgcgcccataaaagctgcccgttctcatcataaattagtgtcatcgtggggctttgcttgtcgatattttcgggtaactcgacatgcaacttattgttttcccacttcgcaagggtatagaacagattgctctcgccacgtaacagccgaaacgtggttttatcgaaactgacgctataaccgatcagcgcaaccattccgtaggcaagcgaaagcaccaatactactgctgccgttgctaacagaaaacgtacccgcagcgagagcgggaaaaaaagatgcagtaattttttcatcagcgcaattcgaacagatagccctggccgcgaacggtggtaatcacttcttgcggatattgtgcctgtatttttttgcgcagacgtcccatcagtacatctatggtatgactttcccgcagctccgcatccggatagagttggagcattaacgaatctttgctcaccactttgccattattgcgtatcaacgtttccataatggtgtattcgaacgcggtcagtttgatcacttcgtcattaatagataattcacggcgggagagatcaacctgaaacgggggtagcgaaatgacctgtgaagccagaccgctattacgccgcattaatgcctgcattcgcgccatcacctcttcaatatgaaacggtttagtcacgtaatcatcagcaccggcacttaatacttcgactttgtcctgccagctttcacgggcggttaataccagaatcggcagtgaaacatcattgctacgccagcggcgaatcagtgacagaccgtcctcgtcaggcaaaccgagatcgacaatcgcaatatccggtaaatgttcattgagataataatcggcttctttggcatcttctgcatcatcgacctgatgaccagcatcctgaatctgaactttaaggtggtgacgtaacaacgcattgtcttcaacaaccagtacgcgcatttttatttctccctgtcttaattattaaaatagtgtaacgcgattatgtggttatgggggtaaacattaaataaaccagcgggggaggggaggtaaagtgaaaaaataaaaagcggataatcttaataagcaggccggacagcatcgccatccggcactgttttgaggcttatttcagctcatcaaccatggtgatggcgcgaccaatgtagttagccggcgtcatcgctttcaggcgggctttctcttcttctggcaacgccagaccatcgataaactgcttcatgccttcggcgtcaacgcgcttaccgcgagtcagctctttcagcttctcgtacggtttttcgatgccatagcgacgcataactgtctggattggttcagccagcacttcccagttgtgatccagttcatccagtagatggtcacggttcacttccagtttactcacgcctttcagggtggattgatacgcaatcagcgcataaccgatacccacgccgaggttacgcagcacggtggagtcggtcaggtcacgctgccagcgggaaactggcagtttgcttgccaggtgctgcaataccgcgttggaaagccccaggttcccttcggagttttcgaagtcgatcgggttaactttatgcggcatggtggaagaaccaatctcaccagcaatggttttctgtttgaagtggttaagggcgatataaccccagacgtcacggtcaaagtcgatcagaatggtgttgaagcgcgcaacgcaatcaaacagttcggcaatgtagtcgtgcggttcgatctgggtggtgtacgggttccactgaatacccagcgaggtgacgaactcttcgctgaactgatgccagtcaacttccgggtaagcggcgatgtgggcgttgtagttaccgacagcgccgttgattttgccgaggatctccacctggttaagctggcggtactggcgctccatacggtaggcgacgttagccatctctttaccaatggttgacggcgtggctggctgaccgtgggtacgggacagcagcgggatatcgcggtactgaacggcgagatctttaataccatcaatcagttgacgccagtacggcaggatcacttcatcacgcgcggttttcagcattaatgcgtgagagaggttattgatatcttccgaagtacaggcaaagtggatgaattcagaaaccgcatgcagttccgggatctccgccactttttctttcaggaaatactcaaccgctttaacgtcgtggttagtggtacgctcgatggttttgatgcgtgctgcatcttcttcgctgaaactggcgacaattgcatcaaggtaaccgattgcgtcggcagcaaaagcaggaacttccttgatcgctgcgtgcgcggccagtttttgcagccaacgtacttcaacttgtacacggaatttcagcaaaccatattcgctgaaaatcccgcgcagcgcgctgactttatcgccgtagcgtccatcgacaggggaaacggcggtcagtgaggataattccatagatcacaactccggggttaaatgagcaagaatttgttttgcctgagtggtcaggcgattacgagaaaacatcagttgcagacgtccgccgccgacctggtgccagagcacggcggcgcgaatgcctgccagcagggtagcgcgaactttcgcctgcacttgtgggctttgcagtacagcaggggaaccggtgacctgaatgcgcgggccaagcgggctaatcacatcaacatagatagcagccatcgcgctcatcagcgtttcggactgtaaatcgaagtgttcgagctggcgttgcaggccgttgatccggttgcccagagtgtcgagcgcacctttcgctgaggagagtttgcgctcaagcaccatcagactgagtgtgtagcgggttaattcggcgtttaagccctggcgactgctggcattgagtacgccgagcaaggtttccagcccgacgcgcaggttggcttcgctaccgccaaaaaccgccagcgttgagctggggttcatatcgataatactgttgagtgagacgtgtagcgcatcgccatcacaatgcccctggtgagcgagttgttgcaccaggcgtgccgactgacaaataccggcaagggcgagggtgatgtcatagtaattctttgccacgttcactgcttccttgttttaagtaaagataataatcagaccggcagcggcagacgctgctcaataataccgccaccgaggcacacttcaccgttatagaaaacggcagactggcccggcgtcacggcggcaaccggctcatcgaaaatcacttcaatgcgatcagcgtccagcgccttgacggtgcacgggatgtcggtctggcgatagcgggtttttactgtgcaacgcatagtaccggtgaacggctcgcgatcgacccagtgcagctgctgggcaatcagaccgacagacatcagacgcgggtgttcatggccttgcgcaacaatcagaatgttgttttcgacgtctttatcgaccacataccacggttcttcggtgccgtctttggtgccaccgatacccagacctttacgctgaccgagggtgtgatacatcagcccctggtgctcaccaatttcatcgccatcgacggtaatgattttgcccggttgcgccgggagataacggcccaggaacttgcggaatttacgctcgccgataaagcagataccggtagagtcttttttcttcgcggtgaccagaccgagatcttcagcaatcttacgcacctgcggtttttccagttcgccgaccgggaacaggctttgcgcaatttgctcatggctgagcgtataaaggaagtagctctggtctttattgctgtccaggccacgcagcaggcggctcttgccatcgacatctgcccgacgtacgtaatgaccggtagcgatataatcggcacctaaatcttcggcggcaaattcgaggaaagctttaaatttgatctctttgttgcacagaatatccggatttggcgtgcgaccggctttatattcggcaaggaacagttcgaagacgttgtcccagtactcggcagcaaagttaacggtgtgcagttcaatgccaagcttgtcgcagacagcctgggcatcagccagatccgctgccgctgtgcaatattcctcaccgtcgtcttcttcccagttcttcataaacaggccttcgacctgatatccctgttgttgcaacagccaggcagaaacggaggaatcgacaccgccggacatgccgacgattactttttttgcggtttcagacattggatcactcacgacattgaacttcaaggcggcgtattctatcacgcagccttttagatgacaccctttgtaaaaggccagttaaaatcgccaatcatctccagcggatagcgttgcccgctttgataacaacgaatactttccgccaccagcggcgaacgaagatttgacgcctgtaaaatttcttcggcgctgacccaacggcagcagtcgatatcgctgtcatgaggctgcgtcgggcatatttgctcaagctcaatggcaaagaggaaacgcaaaaacggcgttttatccggcgcaatccactgatgcatacgaataaagtgttgcggctgcgcgctgatgccggtttcttcccacagctcacgggcggcggcttccactaaggtttcatcggcttccaggtgcccggcaggttggttccataacgctttaccattaatcgtctcttcaacgactaaaaatttgccttctgcgtgcaccacgcaggcaacggtaacgtgcggtttaaacattttgcatccttaatctgtcgcgtctcgccattcgccattggcaagattatccaaagagtaatcccccatcgcatagcgaatcagtcgcagcgtggggaaaccaacatgggcggtcatgcggcgcacctggcgattacgtccttcatataaggtgatcttcagccagctggtgggaatacttttgcgctcacgaattggtggattccgcgggccataaccacgcgggttcttcaaccagctccgcgcctgcgggcagggtagggccatcatttaaggttacgccattgcgcaaggcttcaagtgcgtcttgtgtgggaataccttccacctgcacataatagatttttccggtgcgtttacccggctgggttaaacgcgcctgcaacgcgccgttattggtcagcaccagtaacccttcgctgtcgcggtcgagacgacctgccgcatacaccccctgaaccgggatgaattcttttaatgttttgcgtccggcttcatcggtgaactgcggaagaacatcgtagggtttattgaacaggatcacacgcgtgggctggttttcaggtttacgcctggtagaacgttgcgagctgaatcgcttaacctggtgatttctaaaagaagttttttgcatggtattttcagagattatgaattgccgcattatagcctaataacgcgcatctttcatgacggcaaacaatagggtagtattgacaagccaattacaaatcattaacaaaaaattgctctaaagcatccgtatcgcaggacgcaaacgcatatgcaacgtggtggtagacgagcaaaccagtagcgctcgaaggagaggtgaatggaaagtaaagtagttgttccggcacaaggcaagaagatcaccctgcaaaacggcaaactcaacgttcctgaaaatccgattatcccttacattgaaggtgatggaatcggtgtagatgtaaccccagccatgctgaaagtggtcgacgctgcagtcgagaaagcctataaaggcgagcgtaaaatctcctggatggaaatttacaccggtgaaaaatccacacaggtttatggtcaggacgtctggttgcctgctgaaacccttgatctgattcgtgaatatcgcgttgccattaaaggcccgctgaccactccggttggtggcggtattcgctctctgaacgttgccctgcgccaggaactggatctctacatctgcctgcgtccggtacgttactatcagggcactccaagcccggttaaacaccctgaactgaccgatatggttatcttccgtgaaaactcggaagacatttatgcgggtatcgaatggaaagcagactctgccgacgctgagaaagtgattaaattcctgcgtgaagagatgggcgtgaagaaaattcgcttcccggaacattgcggtatcggtattaagccgtgttcggaagaaggcaccaaacgtctggttcgtgcagcgatcgaatacgcaattgctaacgatcgtgactctgtgaccctggtgcacaaaggcaacatcatgaagttcaccgaaggcgcgtttaaagactggggctaccaactggcgcgtgaagaatttggcggtgaactgatcgacggcggcccgtggctgaaagttaaaaacccgaataccggcaaagagatcgtcattaaagacgtgattgctgatgcattcctgcaacagatcctgctgcgtccggctgaatatgatgttatcgcctgtatgaacctgaacggtgactacatttctgacgccctggcagcgcaggttggtggtatcggtatcgcccctggcgcaaacatcggtgacgaatgcgccctgtttgaagccacccacggtactgcgccgaaatatgccggacaggacaaagtaaacccaggctctattattctctccgctgagatgatgctgcgccatatgggctggactgaagccgcagacctgattgttaaaggtatggaaggcgcaatcaatgcgaagaccgtaacctatgacttcgaacgtctgatggaaggcgctaagctgctgaaatgttcagagtttggtgatgcgatcatcaagaatatgtaatcactacatgtgttaaatattgtaacgggcgtataacacgcccgttgttttatgatgatgtaaaatcttccccaaaactttccccaaaacccttccccaaaactggctattttctatgctgttttgatatctacgataatccagtctttaccacgatcatcattgtatcggtcggtcatttttctggatttatgacctaacaacttttgcgtatccagaccctgttcccgatataaccgttctgacagagatcgctgctcatgaaatgtgggcgcagttcctggctcccattttatgccacatttttccctggcctttttaaaagccgttgtaagagtatttgcagacacctggtctcctctgtttgcttgagaggtagtgtgacggtaatggaccagatatttactaacaacagcatccctgcactgagatataacttcacgaagggtaatattcagagcatcgcatttcaggttaagcggaatagcaagttttgaaccggttttttcctgagtaatgtgcaacatgtcgtcccagatattgaagtggtcaacaaaaactggccaccgagttagagttttttccagtatcgattttccgattcgtttggtggtaacccaccattatattcgtgcggtcttagtgcgctgtaatatccaacgatatagtccgttattgcgtgagctgcatcgctgaagcttacatagcccgtcgccggcacccattcgttcttcagactcctgaagaagcgctccattgggctgttatcccagcagtttccacgccgactcatactctgcctgatccggtatctccacagtaactgccggaactgcctgctcgtataatgactgccttgatcgctgtggaacatcaccccgacgggcttaccacgggtttcccatgccatttccagtgctttcatggtaagcctgctgtccggcgagaacgacatggcccagcccactggttttcttgcgaacaggtcgagaacaacggcgaggtacgcccagcgcttacccgtccagatataggtcacatcaccgcaccacacctgatttggctcggtcacggcgaactgccgttcaaggtagttagggatagcaacatgttcatgaccaccacgtttataccggtaagtcggctgctgacagctgaccagccccagctctttcatgagtctgccagcaagccagcgccccatctggtagcctctctgggttgccattgtggcgatgcttcttgctccggcagagccgtggctgatgccatgcagttcaagtacctggctgcgtaatacagcccgtctgccgtctggcttttcaggacggtttttccagtatttgtagctgctgcgatggaccccgaacacatggcagagagtggccacaggataacgcgccctgagtttcccgattatcgagaactgttcagggagtctgacatcaagagcgcggtagccttttttaatatttcattttccatttcaatacgttgtagctttttcctgagctcacggatttcaatttgttccggggtaataggggaggcttttggtgtttttccctgccgctcatcacgtaattgtttcacccatcgcgtcattgtggaaaggccgacatccatagcgctggctgcatctgccacggtgtaattctggtcaacgaccagttgagcggattcgcgtttaaactctgcgctgaaatttctttttttcattatggcacctgtgttgttctgaggtgagcatatcacctctgttcaggtggccaaattctggccacactcacgtgggtggactggtataacaatcgacgattgctggaaaggcagggccatactcctccggcagaagcagaaaaagcttattatgcttccatcggaaacgatgatctggcagcctgagttcacagataaaacactctccaggaaacccggggcggttcacagtaaaccacttctggccacactcacgtgggtggactggtataacaatcgacgattgctggaaaggcagggccatactcctccggcagaagcagaaaaagcttattatgcttccatcggaaacgatgatctggcagcctgagttcacagataaaacactctccaggaaacccggggcggttcatacagagagcaaaagagaaacgccgatgaacaactcatggtggcaggaactaatgcattttttcctgcaaggaatgacacttaaacagttgattcatatgctaatcatcctgatcatattgattattgttatgccggtaagcgtaaaagaatggataaacctgcatagtccagaaatccttcctcattactggatgtattacatcctgttgttttgcgttagctatgtgcttaacggcgttgttaattccgcttatcacgctgtgactgaaagaattgaggtattcgctgctcagaagcgcaaatctaaagaagaaaaatatgtgcaagatttgtttgattcgttaactcttggagaaagagcgtatttggcattcgctgtagccgctaataaccagctacaaacggaaaagggcgctcatgaatcaatttcattgctcaaaaaaggactcctcgttcgaaggcctcctgctgttggatatcctgataccgaccgtttcgttatccctgaaagctatagacatgagtgctacattaggtttgccgggaaggcagacagccttatggatgaacttatcgctcaggataagcatggcaaaaacaagtaattagcaaatgaatttatcatctcgccgtcagttgttttgatttccggtagcctgccgcgtaaagagctacgttcggaagacaagttgaaccttcatattttctggtcaacgttgtcagagttatcacttctgctctcattgctggtttgagcttgcattgcaagaccactcgtgaaggggttggcctgtgtagcttgtcggagctgatcgcctcctgactttgcagatttgcgcgacgagctctacggcgagaagctgcggtgcctttaaattctgtttttctggacatggattcctcccgaataaactttggcgatgcaatctcgaagctcctcctgagacggttgcttcggcattgcatcccacagcttatgtggttgggtgatctggcttttcagccacgtagtcgagagtcgacgttgtttaaagagcctgccagtctgttccatttggcttccagcgtcctgctgacggttaaatagtacgatatgtactttacaagatcaatacaatttgttgtaagttggcgtggttttttataacgctttgtatttaatagtgttgttttttagcgtggatgtattgcctcggcgatgtaaggagagatcagaattgcgtggtttagtgggttgcatctatttatttttcaataaatataattggttatgtgtttttaggtgggcgaacgtgaggcaaagaaaacccggcgctgaggccgggttgtattatgctgcaagtctcttaacccaagtctctcttttggagaatggtagaacttggcttgattcatggaagagtaaggagagttgttgcatttgatcaccaattgcttcgctgtctataacaacaaatctgttgttatactcctcacttgaagctttaagatcaattagtttcccaagcaatgagtaagcactattccagcttcctccgtgtttcacgcttgatgtaaaaacgtatttaggtatgtcggtttttattgttacagggacggtaatttgatgtccactcaagccatatacgttttcacgaagagaaagtgcgtctctaagctctgtgtgatatagataatcaataaccatactttcaaacttttcagcttgaactggctgataccagtctaacgacaaagttgatgcgagtataccagctctaattatgttcgatgtaatcgcaccgacatccttttctgttgcccaagcaatgatttctcctcgagcattgagttctgcgccttctttaagcagtaattgtcgtatctcatcaagtcgttttttggtaagcgagatccctcttgcctccatattcattaaggcatcgcatctgtcactaactaaatacctaccattgacttcacggataaaggcaccgacatgctctccatcatcacagtaagtgaatggactgataattctcaaggtcttgcctattggatggcattcgaaacctagttgtgagatcactgttgagcacatcatattccaaaccccatttgccccgactcatcttcaagcggtaaaggtattctcccagagtaagttatgttcagatgtttacagaagtaattccaataccctaccaggtcatctgggtttatgtcatcttcgattggaaacgctattctatcactatagtatccagcttcttcatagtatacatggtagtgagcaccgtaaatgatatcttggtacttcggatgatcgaccttgtaactattcgtgtgtttgtcaaagtgataggtatctaccgcgaaaaccctcttgttatgatagaaagcaataatatttattttagggtaagaaatcgggtcatcaggttctgaatcctgatctggtttccatttcagttcaaactttagcccttgtataggtatacaatcctcatccaaggggatgatatgggcttgtagccacatatcagagcgacttggtttctgtttccatttaacgccagaaaagttaactatttttttacaataaagtactttatcaacttctacttggcttggctgataatcatctatttttgccaatgtttaccgccctgtaaattgtagataaaagtggtttcatcacccaaacgtctcttcaggccattggctggcgataactttccccacaacggaacaactctcattgcatgggatcattgggtattgtgggtttagtggctgtagaaacacctgaccgctatccctgatcagtttcttgaaggtaaattcatcaccaccaagtctggctatgcagaaatcgccgggctcaacagcttgctcagggtcaaccagaattaacatcccgtcaggaaagctgggtttggaacctgttggtgcggtcattgagttaccttcaacctcaagccagaatgcagagtcactggcttttttggttgtgcttaccaatctctccgcatcgcctttggtaaaggttctgagttctggagagaacatcccagcctgaacatgagaaaaaacagggtactccatattgttttttaactggggcccgatgagtattccgccaacacggtgaaaatgtccccgtcgtggttgaatgatatgttatcaataccaaggtatttaaacaccacacccaatatcactaagagatggatgacgagatccgcgcaaccagtgtccaatcccaccctgcgtcatacctagctcttcggctaacttctcttgagttatgccgagctctttcattctggatctagccagttcataccatttcattttcatgtccttattattacgctctgtactggaaccatccatgcacaatgtgtatttttacttgtattcgcaaagtacatattgtattttttttattcgtgtttactatggagggcatatgagcaacctacgaaaatatcgagagtcactgaatatctctcaaacaacacttgctaaggcagttggatgcacacagggagctatcggacattgggaatctggtcgtcgcttcccagaccttaaaacatgccgtgctcttgttgcgtgcctaaacaagttaggcgcaaaagtcagtcttgatgacgtgttcccgccggaacacaaagccgcttaataagcggatccgctctttgtaacaacggacattcgtcctacgtcgctgaaaagcgagttccaagatatctgaccaactaaggccatatgcgtttccacgcatacctttcaactaactattcactattggaaatcttaagaaatggaaagaacaagttacagcaaactatcacagcgtgacgttgatcgcgcagaaacagatttacttatcaatctgtcagctattacccagcgcggtctggcaaagatgattggctgtcatgaatcgaagataagcagaacggactggagatttattgcttcggtcttgtgtgctttcggaatggcatcagacatcagtccgattagcagggcttttaagtatgcgcttgatggactcaccaataaaaaacgcccggcggcaaccgagcgttctgaacaaatccagatggaattctgaggtcattactggatcaatccacaggagtcattatgacaaatacagcaaaaatactcaacttctgcagaggtaactttgccaaacaggagcgtaatgtggcagatctcgatgatggttacgccagactatcaaatatgctgcttgaggcttattcaggcgcagatctgaccaagcgacagtttaaagtgctgcttgccattctgcgtaaaacctatggatggaataaaccaatggacagaatcaccgattctcaacttagcgagattacaaagttacccgtcaaacggtgcaatgaagccaagttagaactcgtcagaatgaatattatcaagcagcaaggcggcatgtttggaccaaataaaaacatctcagaatggtgtatccctcaaaacgagggaaaatcccctaaaacgagggataaaacatccctcaaattgggggattgctatccctcaaaacagggggacacaaaagacactattacaaaagaaaaaagaaaagattattcgtcagagaattctggcgaatcctctgaccagccagaaaacgacctttctgtggtgaaaccggatgctgcaattcagagcggcagcaagtgggggacagcagaagacctgaccgccgcagaatggatgtttgacatggtgaagaccatcgcgccatcagccagaaaaccgaattttgcagggtgggctaacgatatccgcctgatgcgtgaacgtgacggacgtaaccatcgcgacatgtgtgtactgttccgctgggcatgccaggacaacttctggtccggtaacgtgctgagcccggccaaactccgcgacaagtggacccagctcgaaatcaaccgtaacaagcaacaggcaggtgtgacagcctgcaaaccaaaactcgacctgacaaacactgactggatttacggggtggatttatgaaaaacatcgccgcacagatggttaattttgaccgtgagcagatgcgtcggatcgccaacaacatgccggaacagtacgacgaaaagccgcaggtacagcaggtagcgcagatcatcaacggtgtgttcagccagttactggcaactttcccggcgagtctggctaaccgtgaccagaacgaactgaacgaaatccgccgccagtgggttctggctttccgggaaaacgggatcaccacaatggaacaggttaacgcaggaatgcgcgtagcccgtcggcagaatcgaccatttctgccatcacccgggcagtttgttgcatggtgccgggaagaagcatccgttatcgccggactgccaaacgtcagcgagctggttgatatggtttacgagtattgccggaagcgaggcctgtatccggatgcagagtcttatccgtggaaatcgaacgcgcactactggctggttaccaacctgtaccagaacatgcgggccaatgcgctgactgacgcggaattacgacgcaaggctgccgatgaactgacctgtatgacagcgcgaattaaccgtggtgagacgatacctgaaccagtaaaacaacttcctgtcatgggcggcagacctctaaatcgtgttcaggcgctggcgaagatcgcagaaattaaagctaagttaggactgaaaggagcaagtgtatgacgggcaaagaggcaattattcattacctggggacgcataatagcttctgtgcgccggacgttgccgcgctaacaggcgcaacagtaaccagcataaatcaggccgcggctaaaatggcacgggcaggtcttctggttatcgaaggtaaggtctggcgaacggtgtattaccggtttgctaccaaggaagaacgggaaggaaagatgagcacgaacctgatttttaaggagtgtcgccagagtgccacgatgaaacggatattggcggtatatggagttaaaagatgaccatctacatcactgagctaataacaggcctgcaggtcaggtaatcgcaggcctttttatttgggggagagggaagtcatgaaaaaactaacctttgaaattcgatctccggcacatcagcaaaacgctattcacgcagtacagcaaatccttccagacccaaccaaaccaatcgtagtaaccattcaggaacgcaaccgcagcttagaccaaaacaggaagctatgggcctgcttaggtgacgtctctcgtcaggttgaatggcatggtcgctggctggatgcagaaagctggaagtgtgtgtttaccgcagcattaaagcagcaggatgttgttcctaaccttgccgggaatggctttgtggtaataggccagtcaaccagcaggatgcgtgtaagcgaatttgcggagctattagagcttatacaggcattcggtacagagcgtggcgttaagtggtcagacgaagcgcgactggctctcgaatggaaagcgcgatggggagatcgggctgcatgactatcaaatcaaatacgccagcacacgacaaggactgctggcaaacgccgctttggctttttgatgcactggatattgagtttggattctggctggattcggcagcgagcgacaaaaatgctctgtgcgctcactggctaactgaggacgacgacgcgctcaattctgagtgggtaagccacggtgcaatctggaataacccaccgtacagcaatatcaggccgtgggtggaaaaagccgctgagcagtgtatacaacagcgacagacggtagtgatgcttgtgccagaggatatgtctgtcggatggttcagcaaggctctggagagtgttgacgaagttcgtattatcactgatggacggattaattttatcgaaccatcgacagggctggagaagaagggaaacagcaaaggctccatgctgctgatttggcgaccgttcatcagtcctcgacggatgtttactaccgtatccaaagcggcattgatggcgatcgggcagggcgtcaggagggctgcatgagacgacagcgacgaagcatcaccgacataatctgcgaaaactgcaaataccttccaacgaaacgctccagaaataaacgcaagctaatcccaaaagaatctgacgtaaaaaccttcaattacacagcccacctgtgggatatccggtggctaagatatcgtgcgaggaaatgacaatggattattcacagttaagtgattttgaaattaacagaatggtaggagacataatttttaaaggcctttgggcaagtaaaccggaaacatcagggaataacaccaacaaatggtattacggaaatgctgatacaacttttgagccattaaatcatttgcctgactactgcaatgatccgagcgcttcatggccgattattgagaaatacaggatttctatcttagaccagttaactgaatggtgtgtggatgcaaaaggcgtaagcccaatatttgataccagacctctccgcgccgccatgattgtctttctcctgatgcaggaggccaataatgcttagcccatctcaatcccttcaatacctgaaagaaagcatagagcgggcttcaatgtgcacagagtggattctatctaggtttagcgcatacagaagattgccggtaaagggcatgccaagcaagtcgatgctgcatatgcaaaagaatgcgcgctggaaggtatggcgagaacacaggttatgtggctgaaagagggggttattaaggcgtgaatacctacagcatcacattaccctggcctccgagcaataatcgctattaccgccataatcgcgggcgcacgcacgtcagcgcagaggggcaggcataccgcgataacgtcgcccgaatcattaaaaacgcaatgctggatatcggcctggctatgcctgtgaaaatccgcattgagtgccacatgccggatcgccgtcgccgtgacctggataatctgcaaaaagccgcttttgacgcactcactaaagcaggtttctggctggatgatgctcaggtcgttgattaccgcgttgtgaagatgcctgttaccaaaggtgggaggctggaactgaccatcaccgaaatggggaatgaatgatgtttgagtttaatatggcagaacttcttcgccaccgctgggggcgtctgcgcttatatcgtttcctcggttctgttttgaccgattaccgaatactgaagaattacgccaaaaccctgacaggaacaggagtatgaagtcagagataacaatcaactaatactgttttgttgatttttgcttgtaattggcgttctggtctgatttttgtggagtaagttgatgcgtgatattcagatggttcttgagcgttggggtgcgtgggcggctaataatcatgaagatgtgacctggtcgtccattgccgccggttttaagggattaattccttcaaaagtaaaatctcgcccgcaatgttgtgacgatgacgcgatgatcatttgcgggtgcatggcccgtctgaaaaagaacaacagcgatttacacgatttattagtagattattatgtatgtggtatgacattcatgtcactggcaagtaagcattgctgctcggatggttatatcgggaaaaggttacagaaggctgagggcataattgaagggatgttaatggcattagatatccggttagatatggatatcgttgctaataattctaattgatatgcaattgtttactaaaagttattaaaaatggggcgtggaaacgcccccaaaataaagggtaatatataacagaaggtttatatagtaagaagcaaggtagtgcttctaaaggaagtggcttgagggctccacttatatgttgcggaggcaaagcctcccgcaacatatctttttcgtaagtcagattagaactgataaaccagacctacagcgacgatgtcgtcggtatcaataccagctgttttggtaaacttactatcgtcaattaagttgattttgtaatcaacaaaagtggacatgtttttattaaagtagtaagtagcaccgacatcgacatacttgactaagtctcggtcaccatgaacaccaaggtctttaccttttgactgaaggtaagcaacagatggacgcagaccgaagtcaaactgatattgtgctactgcttcaaagttttgtgctttgtttgcaatatggttattaccaaaaacggtcatattctgagtttcagaatatgtggtagccagatagatattgttcgcatcatatttcaggcctgcagcccatacttccgcatttttgccggaggcattgaatttgctcttaccataggcgacctgaccgtcagtgcgatctgatttagcataggttgcacccacgccgaatccttcatactcataagtagtggagaaaccgaaaccatcaccattggcttcagttacgtcagtgcggtcatttttaccctgatactgagcagcaaagttcaggccatcgaccagaccaaagaagtcgttgttacgataagttgcaacaccagtagtgcgaccagtcatgaacacatctgtttgggtccaggtatcaccaccgaattctggcagaacgtcagtccacgcaccgatgtcgtatgctacaccgtagttacggccgtaatcgattgagccgtaatcaccaaatttcaggcctgcaaatgcaagacgggttttgtctttggaagaaccttgagattcagcacggttgcctttgaattcatattcccactgaccgaaaccagtcagttgatcgttgatttgggtttcacctttgaagccaagacgggcataagtagtatcaccatcatctgcatcattagaggagaagtagtgcttggcattaactttcccgtatagatccagcttgttactgtctttattataaatttcagctgcctgagcagacatcgccatcagtactgatgcagctacagcagaaattgccactgttaattttttcattgtacgccctttttttgaacttttattaaaaaatgatgtcactgcgcgataaatattcatctaatcaatgtgattatttcaagatgtaagttttagtttctcatttaatttgtgaagtagatctctatttttatctgaaccttttctatctaatcctattcatggctcttgtctgaacaaaaataaatctattagctaatttatattaatggcacttatttataagtgctctataattctttagcttaatttaaacaaactaaaaataacatcggaaattattaactggttatttgttgaagttttcttatgcatttgtggtggtgttttgaacactcggtggcattctcacaaatatcatttagtagtttacgtacgtaaaaaattggttatgctgttaagagtggttacttcgtcacacagcttaaacccgccgtcgagcgggtttttccattttttgagtctcgatattagctgataacccaatacctgagttattcactgactccgaatctgttacgtttctgcctttattgcgatacgtagtatccccttaatttacacccgctttgtctgcgaggtggggttatgaaatccatggataagttaacaacgggtgtcgcctatggtacctcagcaggtagtgccgggtactggtttttacagttgctcgataaagtcacgccctcacagtgggcggcaataggtgtgctgggtagcctggtatttggcctgctgacgtacctgacaaacctttatttcaagattaaagaagataagcgcaaggctgcgagaggtgaataatgcctccatcattacgaaaagccgttgctgctgctattggtggcggagcaattgctatagcatcagtgttaatcactggcccaagtggtaacgatggtctggaaggtgtcagctacataccatacaaagatattgttggtgtatggactgtatgtcacgggcatacaggaaaagacatcatgctcggtaaaacgtataccaaagcagaatgcaaagccctcctgaataaagaccttgccacggtcgccagacaaattaacccgtacatcaaagtcgatataccggaaacaatgcgcggcgctctttactcattcgtttacaacgtgggtgctggcaatttcagaacatcgacgcttcttcgcaaaataaaccagggcgatatcaaaggcgcatgtgatcagctacgtcgctggacatatgctggcggtaagcaatggaaaggtctcatgactcgtcgtgagattgagcgtgaaatctgtttgtggggtcagcaatgaacagagtaaccgcgattatctccgctctggttatctgcatcatcgtctgcctgtcatgggctgttaatcattaccgtgataacgccattacctacaaagcccagcgcgacaaaaatgccagagaactgacgctggcgaacgcggcaattactgacatacagatgcgtcagcgtgatgttgctgcgctcgatgcaaaatacacgaaggagttagctgatgcgaaagctgaaaatgatgctctgcgtgatgatgttgccgctggtcgtcgtcggttgcacatcaaagcagtctgtcagtcagtgcgtgaagccaccaccgcctccggcgtggataatgcagcctccccccgactggcagacaccgctgaacgggattatttcaccctcagagagaggctgatcactatgcaaaaacaactggaaggaacccagaagtatattaatgagcagtgcagatagagctgcccatatcgatgggcaactcatgcaattattgtgagcaatacacacgcgcttccagcggagtataaatgcctaaagtaataaaaccgagcaatccatttacgaatgtttgctgggtttctgttttaacaacattttctgcaccaccacaaatttttgctgcatcgacagttttcttctgcccaattcccgaaacgaagaaatgatgggtgatggtttcctttggtgttactgctgtaggtttgtttccaacagtaaacgtctgttgagcacatcctgtaataagcattgccagagcggcagaaaacaacatttttttcatcttattatcctgcattgttaaaaacggcagaatcctatgtgacaacaattaaacgatagttaaatggattgatgaaaattaaaactacacaggtgggctcagactattggaggaagttggggacactcagaatcctgtggaatgaaataaaccggtctatccgtccattacccttttagctgcgctgtatcgtcgccgtattcccgcattaaccatgaccgtagcccgacggggaattccttctgcgtgagtgtgcgggaataattaaaaacgatgcacaccgggtttttaccgcgttaatgattcgcgggtttatcccggtgcgatggtggaagaaacaggaagctgtattacagaaagtgctactactgtatcccgatgcgatgtatgtaatgtgagtcagataatggcacaggatgtggtgatgtggcagtctggaacacaggatatattgtcagaataagacccgtaggaataaaaatgaaaagacgccttttactactttttctgttatctgtcctggcagtgggatgctcgcagcaaaaagctgatgagccccggcaattagtgacggtgtatccacgatatccggaatatgctgcagcaaattatatcaaggggctggttgaggttaagttcgatattggtgctgatgggactgtgacacggatcgtttttctccgctcagagcctcataatttgtttcgtgatgaagtggtgaaggccatggcgaaatggcgatttgaaaagaatcgcccctgtcagggagtgaagagacaatttatctttacgccgtcacgtccttgatgcttccaggtagagaggggctggaagcaggagaaaaatgaaagagccagcggttatatttttgtcatggctgacgaggaatgatggaagaaggcgttgtatgccacacaacgcctcactgttcatttcttctttttctctggtggaacccgatgaataagagttgcactggtttccgatgagatggcgatatactcgggcaaagtatgctggcagttttccaactggtcaaaaatacctgctctcgtctgttgcaatgcctgcagcatgcggcggcaatgcgccttgcttttactaaccatctttccttcctctatcagtcgctgcgtgaactcatcatggaataccaggtaaatgcggatgttatcggttttggctacgcagcatagtacaaaacggacaggtgcatcccgggacgggggaggcgtcacatgtccctgtgatggttgttccgggtaatgtactgtgtggggcataaaaatgtccgataattttactttctaccgcagttagttgattcgttggtcctggtagcacattgggcgaggatttaaatgccaggcaactgaaggatgatgtcgcaagggagatagcgagaatatttctgattttcatttgatgatgcctctgtgtgaaatgacggtaaacgacgcacttgtgccggcacataatagcaagcaccataatagatcagattcgattcttgctgtaagtgataattattctcgttttcgggtcctttccgtcgatccaacaggttacggggcggcgacctcgcggtttttcactatttatgaaaatttttcagggaaaatcgtgtcggtacttctcgaatataactttttgttttttttaatattgcatccgtaaaggtccgacatgaaagtgtccgaaaatgcctttttctggcgttttcatgtcgggccttgtatttgataatgggttgttttcatgaaggttaataaaaagaggcttgccgaaattttcaacgtggacccgcggacgattgaacgctggcagtctcagggactcccttgcgcctccaaaggtagtaagggcattgaatctgtatttgatactgccatggcaattcagtggtatgcgcagagggaaactgatatcgaaaacgaaaagctccgcaaagaactggacgatttgcgtgcggcagcggagtcagatttacaacccggcaccattgactatgaacgctaccggcacatcttgaaataatcacattgattagatgaatatttatcgcgcagtgacatcattttttaataaaagttcaaaaaaagggcgtacaatgaaaaaattaacagtggcaatttctgctgtagctgcatcagtactgatggcgatgtctgctcaggcagctgaaattataaatttcagctgcctgagcagacatcgccatcagtactgatgcagctacagcagaaattgccactgttaattttttcattgtacgccctttttttgaacttttattaaaaaatgatgtcactgcgcgataaatattcatctaatcaatgtgattatttcaagatgtaagttttagtttctcatttaatttgtgaagtagatctctatttttatctgaaccttttctatctaatcctattcatggctcttgtctgaacaaaaataaatctattagctaatttatattaatggcacttatttataagtgctctataattctttagcttaatttaaacaaactaaaaataacatcggaaattattaactggttatttgttgaagttttcttatgcatttgtggtggtgttttgaacactcggtggcattctcacaaatatcatttagtagtttacgtacgtaaaaaattggttatgctgttaagagtggttacttcgtcacacagcttaaacccgccgtcgagcgggtttttccattttttgagtctcgatattagctgataacccaatacctgagttattcactgactccgaatctgttacgtttctgcctttattgcgatacgtagtatccccttaatttacacccgctttgtctgcgaggtggggttatgaaatccatggataagttaacaacgggtgtcgcctatggtacctcagcaggtagtgccgggtactggtttttacagttgctcgataaagtcacgccctcacagtgggcggcaataggtgtgctgggtagcctggtatttggcctgctgacgtacctgacaaacctttatttcaagattaaagaagataagcgcaaggctgcgagaggtgaataatgcctccatcattacgaaaagccgttgctgctgctattggtggcggagcaattgctatagcatcagtgttaatcactggcccaagtggtaacgatggtctggaaggtgtcagctacataccatacaaagatattgttggtgtatggactgtatgtcacgggcatacaggaaaagacatcatgctcggtaaaacgtataccaaagcagaatgcaaagccctcctgaataaagaccttgccacggtcgccagacaaattaacccgtacatcaaagtcgatataccggaaacaatgcgcggcgctctttactcattcgtttacaacgtgggtgctggcaatttcagaacatcgacgcttcttcgcaaaataaaccagggcgatatcaaaggcgcatgtgatcagctacgtcgctggacatatgctggcggtaagcaatggaaaggtctcatgactcgtcgtgagattgagcgtgaaatctgtttgtggggtcagcaatgaacagagtaaccgcgattatctccgctctggttatctgcatcatcgtctgcctgtcatgggctgttaatcattaccgtgataacgccattacctacaaagcccagcgcgacaaaaatgccagagaactgacgctggcgaacgcggcaattactgacatacagatgcgtcagcgtgatgttgctgcgctcgatgcaaaatacacgaaggagttagctgatgcgaaagctgaaaatgatgctctgcgtgatgatgttgccgctggtcgtcgtcggttgcacatcaaagcagtctgtcagtcagtgcgtgaagccaccaccgcctccggcgtggataatgcagcctccccccgactggcagacaccgctgaacgggattatttcaccctcagagagaggctgatcactatgcaaaaacaactggaaggaacccagaagtatattaatgagcagtgcagatagagctgcccatatcgatgggcaactcatgcaattattgtgagcaatacacacgcgcttccagcggagtataaatgcctaaagtaataaaaccgagcaatccatttacgaatgtttgctgggtttctgttttaacaacattttctgcaccaccacaaatttttgctgcatcgacagttttcttctgcccaattcccgaaacgaagaaatgatgggtgatggtttcctttggtgttactgctgtaggtttgtttccaacagtaaacgtctgttgagcacatcctgtaataagcattgccagagcggcagaaaacaacatttttttcatcttattatcctgcattgttaaaaacggcagaatcctatgtgacaacaattaaacgatagttaaatggattgatgaaaattaaaactacacaggtgggctcagactattggaggaagttggggacactcagaatcctgtggaatgaaataaaccggtctatccgtccattacccttttagctgcgctgtatcgtcgccgtattcccgcattaaccatgaccgtagcccgacggggaattccttctgcgtgagtgtgcgggaataattaaaaacgatgcacaccgggtttttaccgcgttaatgattcgcgggtttatcccggtgcgatggtggaagaaacaggaagctgtattacagaaagtgctactactgtatcccgatgcgatgtatgtaatgtgagtcagataatggcacaggatgtggtgatgtggcagtctggaacacaggatatattgtcagaataagacccgtaggaataaaaatgaaaagacgccttttactactttttctgttatctgtcctggcagtgggatgctcgcagcaaaaagctgatgagccccggcaattagtgacggtgtatccacgatatccggaatatgctgcagcaaattatatcaaggggctggttgaggttaagttcgatattggtgctgatgggactgtgacacggatcgtttttctccgctcagagcctcataatttgtttcgtgatgaagtggtgaaggccatggcgaaatggcgatttgaaaagaatcgcccctgtcagggagtgaagagacaatttatctttacgccgtcacgtccttgatgcttccaggtagagaggggctggaagcaggagaaaaatgaaagagccagcggttatatttttgtcatggctgacgaggaatgatggaagaaggcgttgtatgccacacaacgcctcactgttcatttcttctttttctctggtggaacccgatgaataagagttgcactggtttccgatgagatggcgatatactcgggcaaagtatgctggcagttttccaactggtcaaaaatacctgctctcgtctgttgcaatgcctgcagcatgcggcggcaatgcgccttgcttttactaaccatctttccttcctctatcagtcgctgcgtgaactcatcatggaataccaggtaaatgcggatgttatcggttttggctacgcagcatagtacaaaacggacaggtgcatcccgggacgggggaggcgtcacatgtccctgtgatggttgttccgggtaatgtactgtgtggggcataaaaatgtccgataattttactttctaccgcagttagttgattcgttggtcctggtagcacattgggcgaggatttaaatgccaggcaactgaaggatgatgtcgcaagggagatagcgagaatatttctgattttcatttgatgatgcctctgtgtgaaatgacggtaaacgacgcacttgtgccggcacataatagcaagcaccataatagatcagattcgattcttgctgtaagtgataattattctcgttttcgggtcctttccgtcgatccaacaggttacggggcggcgacctcgcggtttttcactatttatgaaaatttttcagggaaaatcgtgtcggtacttctcgaatataactttttgttttttttaatattgcatccgtaaaggtccgacatgaaagtgtccgaaaatgcctttttctggcgttttcatgtcgggccttgtatttgataatgggttgttttcatgaaggttaataaaaagaggcttgccgaaattttcaacgtggacccgcggacgattgaacgctggcagtctcagggactcccttgcgcctccaaaggtagtaagggcattgaatctgtatttgatactgccatggcaattcagtggtatgcgcagagggaaactgatatcgaaaacgaaaagctccgcaaagaactggacgatttgcgtgcggcagcggagtcagatttacaacccggcaccattgactatgaacgctaccggctcacaaaagcgcaggcagatgcgcaggaactgaaaaatgcccgtgaagacggagtagtgctggaaactgaactgtttaccttcattctgcaacgtgtggcacaggagatttcggggatacttgtgcgtgtgccgttgacattacagcgtaaatatccggacatttcaccatcacaccttgatgtggtgaaaactgaaatcgcgaaagcctccaatgttgcagctaaggccggtgaaaacgtgggcgggtggatcgatgatttcagacgcgcagaaggcagctaatgcagccggtgcgatagctacagggcttttatctctcattattcctgttccactgacgacagttcagtgggccaataaacattattaccttcctaaagagtcgtcttataccccggggcgatgggaaacactgccgtttcaggttggcatcatgaactgtatgggcaacgatctgattcgcacggttaacctgattaaatctgcccgtgttggttatacaaagatgttgctgggagtggaggcttattttattgagcataaatcacgcaacagccttctttttcagcccacggactcagctgctgaagattttatgaaatctcatgttgagccaacgataagggatgttcctgcattgctggagctggctccatggttcggaagaaaacaccgcgataatacgctcaccctgaagcgtttttcctccggtgtggggttctggtgtctgggtggtgcggcagcaaaaaactaccgtgaaaaatccgtggatgtggtctgttatgacgagctttcctcgttcgaaccggatgttgaaaaagagggttcgccaaccctgctgggggtccgataattttactttctaccgcagttagttgattcgttggtcctggtagcacattgggcgaggatttaaatgccaggcaactgaaggatgatgtcgcaagggagatagcgagaatatttctgattttcatttgatgatgcctctgtgtgaaatgacggtaaacgacgcacttgtgccggcacataatagcaagcaccataatagatcagattcgattcttgctgtaagtgataattattctcgttttcgggtcctttccgtcgatccaacaggttacggggcggcgacctcgcggtttttcactatttatgaaaatttttcagggaaaatcgtgtcggtacttctcgaatataactttttgttttttttaatattgcatccgtaaaggtccgacatgaaagtgtccgaaaatgcctttttctggcgttttcatgtcgggccttgtatttgataatgggttgttttcatgaaggttaataaaaagaggcttgccgaaattttcaacgtggacccgcggacgattgaacgctggcagtctcagggactcccttgcgcctccaaaggtagtaagggcattgaatctgtatttgatactgccatggcaattcagtggtatgcgcagagggaaactgatatcgaaaacgaaaagctccgcaaagaactggacgatttgcgtgcggcagcggagtcagatttacaacccggcaccattgactatgaacgctaccggctgaaatgacggtaaacgacgcacttgtgccggcacataatagcaagcaccataatagatcagattcgattcttgctgtaagtgataattattctcgttttcgggtcctttccgtcgatccaacaggttacggggcggcgacctcgcggtttttcactatttatgaaaatttttcagggaaaatcgtgtcggtacttctcgaatataactttttgttttttttaatattgcatccgtaaaggtccgacatgaaagtgtccgaaaatgcctttttctggcgttttcatgtcgggccttgtatttgataatgggttgttttcatgaaggttaataaaaagaggcttgccgaaattttcaacgtggacccgcggacgattgaacgctggcagtctcagggactcccttgcgcctccaaaggtagtaagggcattgaatctgtatttgatactgccatggcaattcagtggtatgcgcagagggaaactgatatcgaaaacgaaaagctccgcaaagaactggacgatttgcgtgcggcagcggagtcagatttacaacccggcaccattgactatgaacgctaccggctcacaaaagcgcaggcagatgcgcaggaactgaaaaatgcccgtgaagacggagtagtgctggaaactgaactgtttaccttcattctgcaacgtgtggcacaggagatttcggggatacttgtgcgtgtgccgttgacattacagcgtaaatatccggacatttcaccatcacaccttgatgtggtgaaaactgaaatcgcgaaagcctccaatgttgcagctaaggccggtgaaaacgtgggcgggtggatcgatgatttcagacgcgcagaaggcagctaatgcagccggtgcgatagctacagggcttttatctctcattattcctgttccactgacgacagttcagtgggccaataaacattattaccttcctaaagagtcgtcttataccccggggcgatgggaaacactgccgtttcaggttggcatcatgaactgtatgggcaacgatctgattcgcacggttaacctgattaaatctgcccgtgttggttatacaaagatgttgctgggagtggaggcttattttattgagcataaatcacgcaacagccttctttttcagcccacggactcagctgctgaagattttatgaaatctcatgttgagccaacgataagggatgttcctgcattgctggagctggctccatggttcggaagaaaacaccgcgataatacgctcaccctgaagcgtttttcctccggtgtggggttctggtgtctgggtggtgcggcagcaaaaaactaccgtgaaaaatccgtggatgtggtctgttatgacgagctttcctcgttcgaaccggatgttgaaaaagagggttcgccaaccctgctgggggataaacgtattgagggctctgtatggccaaaatccattcgcggctcgacgcctaaaatcaaaggctcctgccagatcgaaaaagccgctaacgagtcggcacacttcatgcgtttttatgtgccctgtccgcactgtggggaggagcagtatctgaaatttggcgatgatgcctcgcctttcggtcttaagtgggagaagaataagccagaaagtgttttctacctttgtgagcatcatggctgtgtgatccatcagtctgagcttgaccagagtaacgggcggtggatctgtgaaaacacgggcatgtggacccgtgacggcctgatgtttttcagcgcccggggtgatgaaattccgccgccgcgctccatcactttccatatctggacggcgtacagtccgttcaccacctgggtacagattgtctatgactggctggatgcactgaaagatcccaacggcctgaaaacctttgtgaacaccacgctgggcgagacctgggaagaggctgtgggcgaaaaactcgatcaccaggtgctgatggataaggttgtgcgttacacggcggcggtgcctgcccgggtggtttatctgacggcgggcattgactcgcagcgaaaccgttttgagatgtatgtctggggatgggctccgggagaggaagcctttctggtggataaaatcatcattatggggcgtcccgatgaggaagagacgctgttacgtgtggatgcggcgatcaacaaaaaataccgccatgcagacggaaccgaaatgaccatttcccgtgtctgctgggacatcggggggatcgatggcgaaatcgtttatcagaggtcaaaaaaacacggtgttttccgggtgctgccggtaaaaggcgcgtctgtctatggcaagccggtgatcaccatgccgaaaacccgcaatcagcggggcgtttatctgtgtgaagtggggacggacaccgcaaaagaaattctctatgcccgtatgaaagccgagcccacgcctgcggatgaagccacgtcgtatgccatccgttttcctgatgatccggagattttttcgcagacagaggcgcagcaactggtcgcggaagagcttgtggagaagtgggaaaaaggaaagatgcgtctgctgtgggataacaaaaagcggcgtaacgaagcgctggactgcctggtgtatgcctacgcggcattacgtgtgtccgtgcaacgctggcagcttgatctggctgtactggcaaaatcccgggaagaagagacgacccggccaacccttaaagaactggcagcgaagctgtccggaggagtgaatggttacagtcgctgaactgcaggcgctgcgtcaggcgcgccttgatttattaaccggtaaacgggtggtgtctgtccagaaagatggtcgcagaattgaatatacggcggcttctctggatgagcttaaccgggcgatcaatgatgcggagtcggtactggggacaacccggtgtcgccgtcgtccgctgggagtgaggttatgaaacgaacgcctgtcctgattgatgtgaacggcgttccgcttcgtgagagtctcagctacaacgggggcggtgcaggatttggcgggcaaatggctgagtggttgccaccggcgcagagtgccgatgcggccctgctgcccgcgttgcgtctggggaatgcccgggcagatgatctggtgcgcaataacggaatagcggctaatgcggtggctctgcataaggatcacattgtcgggcatatgtttctgatcagctaccgtccgaactggcgctggctggggatgcgggagaccgcagcaaaaagctttgtcgatgaggtggaggcggcctggtcggaatacgccgaagggatgtttggcgagatcgacgtggaaggaaaacgcacgttcacggaatttatccgtgaaggtgtgggcgttcatgcgtttaacggcgaaatctttgtgcagccggtctgggatacggaaaccacgcagttattccgtacgcgttttaaagccgtgagtccgaaacgggtggacacgcctggacacggtatggggaaccgttttctgcgggccggtgtggaggtcgatcgatatggccgtgccgtcgcgtaccatatctgtgaggatgattttccgttctctggtagtggacgatgggaacggatcccgcgtgaacttcccaccgggcgtccggccatgctgcatattttcgagccggtggaggacgggcagacccgtggggctaatcagttttacagcgtcatggaacggctgaagatgctcgattccctgcaggcaacacagcttcagtcggccatagtgaaggcgatgtatgcagcgacgattgaaagtgaacttgataccgaaaaggcctttgaatatatcgccggcgcgccacaggagcagaaggataatccgcttattaatattctggagaagttctccagctggtatgacacgaataacgtgacactgggcggtgtcaaaattccgcaccttttccctggtgatgatctgaaactacagactgcgcaggattcagacaatggattttctgcgcttgaacaggcgctgctgcggtatatcgccgccggtcttggcgtttcctacgaacagttgtcccgtgattactcgaaggtcagttactcaagtgcccgcgcctccgccaatgagtcgtggcgctattttatggggcggcgaaaatttattgcggcccggctggccacgcagatgttttcctgctggctggaagaggcacttcttcgggggattattcgtccgccacgggcacgttttgatttttatcaggcgcgatcagcctggtcacgggcagagtggattggtgccggaagaatggccattgacgggctcaaggaagtccaggaatcagtgatgcgcattgaggccggactgagcacgtatgagaaagagctggcgctgatgggcgaggattatcaggacattttccgccagcaggtcagggaatctgctgagcggcaaaaagccggactctcacgtccggtgtggatagagcaggcgtatcagcagcagatagcggagagtcgtaggccggaagaggagacaacaccacgtgagacgtaatctttcacacattattgccgcagcattcaatgaaccgctgcttctggagcccgcctatgcgcgggttttcttttgcgcgctcgggcgcgagatgggggcagcaagtctttcggtaccacaacagcaggtacagtttgatgctcccggaatgctggctgaaacggacgagtacatggccggaggtaaacgaccggcccgtgtttaccgggtggtgaacggtattgctgtactgccggtgaccggcacgctggtgcaccggctgggtggtatgcggccattttccggaatgacaggctatgacggcattgtcgcctgtcttcagcaggcaatggcggatagccaggtgcggggcgtactgctggacattgacagtccgggcgggcaggccgccggcgcgtttgactgcgctgacatgatttaccgcctccgtcagcagaagccggtctgggcactgtgcaatgacacggcctgttctgcagccatgctgctggcgtcggcctgctcccgacggctggttacccagacatcccgtatcggctccattggcgtgatgatgagccatgtcagctatgccggtcatctggcgcaggccggtgtggatatcacgctgatttactcaggggcgcacaaggtggatggcaatcagtttgaagcgttgccggcagaggttcgccaggacatgcagcagcggattgatgcggcgcgccggatgtttgccgaaaaagtggcgatgtataccggtctgtctgttgatgccgtcacgggaacagaggctgccgtttttgaaggtcagtccggcattgaggccgggctggcggatgaattaatcaatgcgtcggatgccatcagtgtgatggccacggcgctgaacagtaatgtcagaggaggcactatgccgcaattaactgcaacggaagccgccgcgcaggagaaccagcgagtgatggggatcctgacatgccaggaagcgaaaggacgtgaacagcttgccacgatgctggcaggacaacagggcatgagcgttgaacaggcccgggcgattctggccgcggcggcaccgcagcagccggtggcatccacgcagagtgaagccgatcgcattatggcgtgtgaagaagcgaacggtcgtgaacaactggcggcaacgctggcggcgatgccggagatgacggtggaaaaagcccgcccgatcctggctgcttcaccgcaggcggatgccggaccatcactccgtgatcagatcatggcactggatgaggcaaaaggggctgaggcgcaggctgaacagctggctgcctgcccgggaatgacagtggagagcgcccgggctgtgctggctgcgggatcaggtaaggcagaaccggtctctgcatccacaaccgccatgtttgaacatttcatggcgaaccattcaccggcagcggtacagggtggcgtggcacagacgtcagcagacggtgatgcggacgtgaaaatgctcatggccatgccatgaagtcagtgctgaccatcaataggaggtttttacaatatggtgacgaaaaccatcactgaacagcgtgcggaagtacgtatttttgccggtaatgatccggctcataccgccacaggcagcagcgggatttcctcgccaacaccggcactgacgcccctgatgctggatgaagccaccgggaaactggtggtctgggacggacagaaagccggtagtgcggttggcatactggtactgccgcttgaaggcacagagacggcgctgacgtattacaagtcgggaacctttgcgacggaggcaatccactggcctgaaagtgtggatgaacacaaaaaggccaacgcctttgctggcagtgccctgagtcacgcggcgctgccgtaacacgttatcaggccaccgcggtggcctgactgatttctgaatgaaaggaactgatttatgggattgtttacgacccgccagttactcggttataccgaacaaaaagttaaatttcgtgcgctgtttctggagctgtttttccgccgtacggtgaatttccataccgaagaggtgatgctggacaaaattaccggaaaaacgccggtggcggcctatgtctccccggttgttgaaggaaaagtgctgcgtcatcgtggtggtgaaacccgcgtgttgcgtccgggctacgtcaagccgaaacacgaatttaattaccagcaggcggttgagcgccttcctggtgaagatccatctcaactgaatgatccggcttaccgccgtctgcgtatcattaccgataacctcaaacaggaagagcacgcgattgtccaggtggaagaaatgcaggcggtaaatgctgtgttgtatggcaaatacaccatggaaggagaccagttcgagaaaattgaggtcgattttggcaggtcgacgaagaataacatcactcagggtagtggtaaggagtggtcaaaacaggatcgtgacacgttcgatcctacacatgatattgacctctactgcgacctggccagcggtcttgtgaatattgccattatggacggtaccgtctggcgtcttctgaatggttttaagctgttccgcgaaaaactggatacccgtcgcggttcaaattctcaactcgaaacggcagtgaaagatctgggcgcagtggtgtccttcaaggggtattacggcgatctggccattgtggtggcgaaaacgtcttatatagcagaagacggtatcgaaaaacgttatcttccagatggcatgctggttctggggaatactgctgcagatgggatccgttgttacggtgccattcaggatgctcaggcgttgtccgaaggtgtggtggcctcttcccgttatccgaaacactggctgacggtaggggatcccgcccgtgaatttaccatgacgcagtccgcgccgctgatggtgttgccggacccggatgagtttgtggtggtacaggtgaaataatccgtgagcgggggcgaaatgcccccgtgtcttttttcacagggggctgatatggcaacgaaagagcaaaatctgaaacggcttgatgaactggccctgattctggggcgtgagccggatatatccgggagtgccgcagagatagcgcagcgggtggcagaatgggaagaggaaatgcagtcatccggcgatgatgtacaggttatgaatatggatatccgggagcgggaaaccgcggctcatgatgttcgtgaggaaacatccggcgcgttaacgcgcatcagagttctgacctgcctccatctctgtggcgttgatggtgaaacgggggaatccgttgagcttgcggatgttggtcgggtgattctgattatgtcctcagatgcaaaaacacacgttgatggtggaatggctgtttatgcgtgattttcagaatgcctttgatgccgcccttgccggggtggacagtacgattgttgaagtgatgggcatcagtgcgcagttcacctccggtgcacagcgtggcggcgaggttcatggcgtttttgacgatccggagtcgctgggttttgccagtagtgggatccgtattgaaggaagtaacccgtcattatttgtgcttacggatacggtttgtgctgtacggcgtggtgacacgctgaccattaacggcgagatgttctgggtggaccgtgtttctccggatgacggagggagttgttatctctggctcaaccgggggcaaccacctgccgccagccgtcgccgctgaaagggggatgtatggccataaaaggtcttgagcaggccgttgaaaacctcagccgtatcagcaaaacggcagtgcctggtgccgccgcaatggccattaaccgcgttgcttcatccgcgatatcgcagtcggcgtcactggttgcccgtgagacaaaggtacgccggaaactggtaaaggaaagggccaggctgaaaagggccacggtcaaaaatccgcaggccagaatcaaagttaaccggggggatttgcccgtaatcaggctgggtaatgcgcgggttgtcctttcgcgccgcaggcgtcgtaaaaaggggcagcgttcatccctgaaaggtggcggcagcgtgcttgtggtgggtaaccgtcgtattcccggcgcgtttattcagcaactgaaaaatggccgctggcatgtcatgcagcgtgtggccgggaaaaaccgttaccccattgatgtggtgaaaattccgatggcggtgccgctgaccacggcgtttaaacagaatattgagcggatacggcgtgagcgtcttccgaaagagctgggctatgcgctgcagcatcaactgaggatggtaataaagcgatgaaacatactgaattccgtgcagccgtactggatgcactggaaaaacatgacaccggggcgacgctttttgatggtcgccccgctgtttttgatgaggcggattttccggcaattgccgtttatctcaccggcgctgaatacacgggcgaagagctggacagcgatacctggcaggcggagctgcatattgaagttttcctgcctgctcaggtgccggattcagagctggattcgtggatggaaagccggatttatccggcgatgagcgatatcccggcactgtcagatttgatcaccagtatggtggccagtggctatgactaccggcgcgacgatgatgcgggcctgtggagttcagccgatctgacttatgtcattacctatgaaatgtgaggacgatatgccaacaccaaatcctctggcaccggtgaaaggggccggaaccacactgtgggtttataacgggagcggcgacccttatgcaaacccgctttcagacaatgactggtcgcgtctggcaaaaattaaagacctaacgcccggcgaactgaccgctgagtcctatgacgacagttatctcgatgatgaagatgcggactggaccgcgaccgggcaggggcagaaatccgccggagataccagcttcacgctggcgtggatgcccggagagcaggggcagcaggcgctgctggcgtggtttaatgaaggtgatacccgtgcctataaaatccgcttcccgaacggcacggtcgatgtgttccgtggctgggtcagcagtatcggtaaggcggtgacggcgaaggaagtgatcacccgtacggtgaaggtcaccaatgtgggccgtccgtcaatggcagaagatcgcagtacggtgacggcggcaaccggtatgaccgtgacgcctgccagctcctcggtggtgaaagggcagagcaccacgctgaccgtggccttccagccggagggcgcaactgacaagagcttccgtgcggtgtcagcggataaaacaaaagccaccgtgtcggtcagtggtatgaccatcaccgtgaacggcgttgctgcaggcaaggtcaacattccggttgtatccggtaatggtgaacttgctgcggttgcagaaatcactgtcaccgacagttaatccggagagtcagcgatgttcctgaaaaccgaatcatttgaacataacggcgtgaccgtcacgctttctgaactgtcagccctgcagcgtattgagcatctcgccctgatgaaacagcaggcagaacaggcggagtcagacagcaaccggcaggttactgtggaagacgccatcagaaccggtgcttttgtggtggcgatgtccctgtggcataaccatccgcagaagacaaagcagccttccatgaatgaagccgttaaacagattgagcaggaagtgcttaccacctggcccgcggaggcaatttctcatgctgaaaacgtggtgtaccggctgtccggtatgtatgggtttgtggtgaatgatgcccctgaccaggcagaggactccgggcctgcagagcctgtttctgcgggaaagtgttcgacggtgagctgagttttgccctgaaactggcgcgagagatggggcgacctgactggcgcgccatgcttgccgggatgtcatccacggagtatgccgactggcaccgcttttacagtacccattattttcatgatgttctgctggatatgcacttttccgggctgacgtacactgtgctcagcctgtttttcagcgatccggatatgcatccgctggatttcagtttgctgaaccggcgtgaggatgacgaagagcctgaagatgatgtgctgatgcagaaagcggcagggcttaccggaggcgtccgctttgacccggacggaaatgaagttatccccgcttccccggatatggcgggcatgacggaggatgacgtaatgctgatgacagtatcagaagggatcgcaggaggagtccggtatggctgaaccggtaggcgatctggtcgttgatttaagtctggatgcggccagatttgacgagcagatggccagagtcaggcgtcatttttccggtacggaaagtgatgcgaaaaaaacagcggcagtcgttgaacagtcgctgagccgacaggcgctggctgcacagaaagcggggatttccgtcgggcagtataaagccgccatgcgtatgctgcctgcacagttcaccgacgtggccacgcagcttgcaggcgggcaaagcccgtggctgatcctgctgcaacagggtggtcaggttaaggactccttcggcgggatgatccccatgttccgggggcttgccggtgcgatcaccctgccgatggtcggggccacctcgctggcggtggcgaccggtgcgctggcgtatgcctggtatcagggtaactcaaccctgtccgatttcaacaaaacgctggtcctttccggcaatcagtcgggtctgacggcagatcgtatgctggtcctgtccagagccgggcaggcggcagggctgacgtttaaccagaccagcgagtcactcagcgcactggttaaggcgggagtaagcggtgaggctcagattgcatccatcagccagagtgtggcgcgtttctcctctgcatccggcgtggaggtggacaaggtcgctgaagccttcgggaagctgaccactgacccgacgtcggggctgacggcgatggcgcgccagttccataacgtaacggcggagcagattgcgtatgttgctcagttgcagcgttccggcgatgaatccggggcattgcaggcggcgaacgaggccgcaacgaaagggtttgatgaccagacccgacgcctgaaagagaacatgggcacgctggaaacctgggcagacaggacagcacgggcattcaaatccatgtgggatgcggtgctggatattggtcgtcctgataccgctcaggagatgctgattaaggcagaggctgcgtttaagaaagcggacgacatctggaatctgcgcaaggatgattattttgttaacgatgaagcgcgggcgcgttactgggatgatcgtgaaaaggcccgtcttgcgcttgaagccgcccgaaagaaggctgaacagcagagtcaacaggacaaaaatgcgcagcagcagagcgataccgaagcatcacggctgaaatataccgaagaggcgcagaaggcttacgaacggctgcagacaccgctggagaaatataccgcccgtcaggaagaactgaacaaggcactgaaagacgggaaaatcctgcaggcagattacaacacgctgatggcggcggcgaaaaaggattatgaagcgacgctgaaaaagccgaaacagtccggcgtgaaggtgtctgcgggcgatcgtcaggaagacagtgctcatgctgccctgctgacgcttcaggctgaactccggacgctggagaagcatgccggagcaaatgagaaaatcagccagcagcgccgggatttgtggaaggcggagagtcagttcgcggtactggaggaggcggcgcaacgtcgccagctgtctgcacaggagaaatccctgctggcgcataaagatgagacgctggagtacaaacgccagctggctgcacttggcgacaaggttacgtatcaggagcgcctgaacgcgctggcgcagcaggcggataaattcgcacagcagcaacgggcaaaacgggccgctattgatgcgaaaagccgggggctgactgaccggcaggcagaacgggaagccacggaacagcgcctgaaggaacagtatggcgataatcctctggcgctgaataacgtcatgtcagagcagaaaaagacctgggcggctgaagacctgcttcgcgggaactggatggcaggcctgaagtccggctggagtgagtgggaagagagtgccacggacagtatgtcgcaggttaaaagtgctgccacgcagacctttgatggtattgcgcagaatatggcggcgatgctgaccggcagtgaacagaactggcgcagcttcacccgttccgtgctgtccatgatgacagaaattctgcttaagcaggcaatggtggggattgtcgggagtatcggcagcgctattggcggggctgttggtggcggcgcatccgcgtcaggcggtacagccattcaggccgctgcggcgaaactccattttgcaaccggaggatttacgggaaccggcggcaaatatgagccagcggggattgttcaccgtggtgaatttgtcttcacgaaggaggcaaccagccggattggcgtgggaaatctctaccggctgatgcgcggctatgccaccggcggttatgtcggtggcaccggaagtccggcgcaaatgcggcgttcagagggtatcaggtttgagcagaacaacaacgtggtgattcagaacgacggtacgaatggtctgccaggtccacagatgatgaaggcggtgtatgacatggcccgcaagggtgcccgtgatgaaatccaggcacagatgcgcgatggtggtctgttctccggaggtggacgatgaaaaccttccgctggaaagtgaaacccgggatggatgtgacatcggctccttccgtcagggaggtgcgctttggtgatggctattcccagcgtgcgcctgccgggctgaacgctgacctgaaaacgtacagcgtgacgctgtctgtctcccgtgaggaggccacggcgctggagtcgtttctggctgagcacgggggctggaaggcctttctgtggacgccgccttatggttacaggcagataaaggtgacctgcgcaaaatggtcgtcgcgggtcagtatgctgcgtgttgagttcagcgcagagtttgaacaggtggtgaactgatgcaggatatccggcaggaaacattgaatgaatgcacccgtgcggagcagtcggccagcgtggtgctctgggaaatcgatctgacagaggtcggtggagaacgttattttttctgtaatgagcagaacgaaaaaggtgagccggtcacctggcaggggcgacagtatcagccgtatcccattcaggggagtagttttgaactgaatggcaaaggcaccagtacgcgccccacgctgacggtttctaacctgtacggtatggtcaccgggatggtggaagatctgcagagtctggtcggcggaacggtggtcaggcgtaaggtttacgcccgttttctggatgcggtgaacttcgtcaacggaaacagcgacgccgatccggagcaggaggtgatcagccgctggcgcatcgagcagtgcagcgaactgagtgcggtcagtgcctcctttgtactgtccacaccgacggaaacggatggtgccgtttttccggggcgcatcatgctggctaatacctgcacctggacctatcgcggtgatgagtgcggttatcacggtccggcggtcgcggatgaatatgatcagccgacttccgatatcacgaaggataaatgcagcaaatgcctgagcggctgtaagtttcgcaataacgtcggcaactttggcggcttcctttccattaacaaactttcgcagtaaatcccatgacagagacagaatcagcgattctggcgcatgcccggcgatgtgcgccagcggagtcgtgcggcttcgtggtgagagcgccggagggggaaagatattttccctgcgtgaatatctccggtgagccggaggcgtatttccggatggctccggaggactggctgcaggcagagatgcagggtgagattgtggcgctggtccacagtcatcccggtggtctgccctggctgagtgaggccgaccggcggctgcaggtgcagagtgatttgccgtggtggctggtctgccggggggcgattcataagttccgctgtgtgccgcatctcaccgggcggcgctttgagcacggggtgacggactgttacacgctgttccgggacgcttaccatctggcggggattgagatgccggactttcatcgtgaggatgactggtggcgtaacggccagaatctctatcttgataatctggaggccacagggctgtatcaggtgccgttgtcagcggcgcagccgggcgatgtgctgctgtgctgctttggttcatcggtgccgaatcatgccgctatttactgtggtgacggcgagctgctgcaccatattcctgaacaactgagtaaacgagagaggtataccgacaaatggcagcgacgcacacactccctctggcgtcaccgggcatggcgcgcatctgcctttacggggatttacaacgatttggccgccgcatcgaccttcgtgtgaaaacgggggctgaagccatccgcgcactggccacacagctcccggtgtttcgtcagaaactgagcgacggctggtatcaggtacggattgccgggcgggacgtcagcacgtccgggttaacggcgcagttacatgagactctgcctgatggcgctgtgattcatattgttcccagagtcgccggggccaagtcaggtggcgtattccagattgtcctgggggctgccgccattgccggatcattctttaccgccggagccacccttgcagcatggggggcagccattggggccggtggtatgaccggcatcctgttttctctcggtgccagtatggtgctcggtggtgtggcgcagatgctggcaccgaaagccagaactccccgtacacagacaacggataacggcaaacagaacacctatttctcctcactggataacatggttgcccagggcaatgttctgccggttctgtacggtgaaatgcgcgtggggtcacgcgtggtttctcaggagatcagcacggcagacgaaggggatggtggtcaggttgtggtgattggtcgctgatgcaaaatgttttatgtgaaaccgcctccgggcggttttatcgtttatggagcatgaggaatgggtaaaggcagcagtaaggggcataccccgcgcgaagcgaaggacaacctgaaatcatcccagatgctgagcgtgatagacgccatcagcgaagggccggttgaaggtccggtggatggattaaaaagcgtgctgctgaacagtacgccggtgctggacagtgaggggaataccaatatattcggcgtcacggtggtgttccgggccggtgagcaggagcagacaccgccggagggatttgaatcctccggctccgagacggtgctcggtacagaagtgaaatatgacacgccgatcacccggaccatcacgtcggcaaacattgaccgtctgcgttttactttcggcgtgcaggcactggtggaaaccacctcaaagggggacaggaatccatcggaagtccgcctgctggttcagattcaacgtaacggtggctgggtgacggaaaaagacatcaccattaagggcaaaaccacgtcgcagtatctggcctcggtggtggtggataacctgccgccgcgcccgtttaatatccggatgcgcaggatgacgccggacagcaccacagaccagttgcagaacaaaacgctctggtcgtcatacaccgaaatcatcgatgtgaaacagtgctacccgaacacggcactggtcggcgtacaggtggactcggagcagttcggcagccagcaggtgagccgtaattatcatcttcgcgggcgcattctgcaggtgccgtcgaactataacccgcagacgcggcaatacagcggtatctgggacggaacgtttaagccagcatacagcaacaacatggcctggtgtctgtgggatatgctgacccatccgcgctacggcatggggaaacgtcttggtgcggcagatgtggataaatgggcgctgtatgtcatcggccagaattgcgaccagtcagtgccggacggctttggcggcacggagccgcgcatcacctgtaatgcgtacctgaccacacagcgcaaggcgtgggatgtgctcagtgatttttgctcggcgatgcgctgtatgccggtatggaacgggcagacgctgacattcgtgcaggaccgaccgtcggataaggtgtggacctataaccgcagtaatgtggtgatgccggatgatggcgcgccgttccgctacagcttcagcgccctgaaagaccgccataatgccgttgaggtgaactggattgacccggataacggctgggagacggcgacagagcttgtggaggacacgcaggccattgcccgttacggtcgtaacgtcacgaagatggatgcctttggctgtaccagccgggggcaggcacaccgcgccgggctgtggctgattaaaacggagctgctggaaacgcagaccgtggacttcagcgtgggtgcagaagggcttcgccatgtaccgggcgatgtcattgaaatctgtgatgatgactatgcggggatcagcatcggcgggcgcgtgctggcggtgaacaaccagacgcggacactgacgctcgaccgtgaaatcacgctgccatcctccggcaccacgctgataagcctggctgacggacaggggaatccggtcagcgtggaggtccagtccgtcaccgacggcgtgaaggtaaaagtgagccgtgttcctgacggcgttgcagaatacagcgtgtgggggctgaagttgccaacgttgcgccagcgcctgttccgctgtgtgagtatccgtgagaacgatgacggcacgtatgccatcactgccgtgcagcatgtaccggaaaaagaggccatcgtggataacggggcgcactttgacggcgaccagagcggcacggtgaatggtgtcacgccgccagcggtgcagcacctgactgccgaagtcaccgcagacagcggggaatatcaggtgctggcgcgctgggacacgccgaaggtggtgaagggggtgagctttatgcttcgcctgaccgtggcagcggatgacggcagtgagcggctggtcagcacggcccggacgacggaaaccacataccgcttcaggcaactggcgctggggaactacaggctgacagtccgggcggtaaatgcgtgggggcagcagggcgatccggcatcggtatcgttccggattgccgcaccggcagcgccgtcgcagattgagctgacaccggggtattttcagataaccgccacgccgcatcttgcggtttatgatccgacggtacagtttgagttctggttctcggaaaagcggattgcggatatcaggcaggttgaaaccacagcacgctatcttggcacggcgctgtactggatagccgccagtatcaatatcaaaccgggccatgattattatttttacatccgcagtgtgaacaccgttggcaaatcggcatttgtggaggctgttggccagccgagtgatgatgcatccggctatctgaattttttcaaaggagagatagggaaaacccatctggctcaggagttgtggacgcagattgataacggtcagcttgcgcctgacctggctgaaatcaggacgtccattacgggtgtcagcaatgaaatcacgcagaccgtcaataagaaactggaagaccagagtgcagcgatccagcagatacagaaggttcaggttgatacaaataataacctgaacagcatgtgggctgtgaagctgcagcagatgcaggacggacgcctttatatcgcgggtattggtgccggtgttgagaatactcctgacggtatgcagagtcaggtgctgctggcggcggacaggattgcgatgattaatcctgcgaatggcaacacaaagccgatgtttgttgggcagggcgatcagatattcatgaacgaagtgttcctgaaatatctgacggctcccaccattaccagcggtggcaatcccccaacgttttcactgacacctgatggtcgactttctgcgaaaaatgcggatatcagcggtaacgtgaacgcgaactccgggacgctcaacaacgtcacgattaatcagaactgtcggattctgggaaaactgtcagctaaccagattgaaggtgatattgtcaaaacggtgggaaaagcctttccgagaaatggcagttatgccagcggtacaataacggtcactgtgtacgatgaccaggcttttgaccgtcagatagtagtcccccccgttctgtttcgtgggggtaagcatgaaaacttcaacagcaacaaccaacagtcatactggtattcaacctgtaagctgcaggtactgaagaacggacaggaaatctttcagcaacccgcgacggatgtcagcagggtattttcatcagtcattgatatgcctgccggacacggccatgtcaccctgactttcaatgtttcttcatatggtgctaataactggacgccaacgaccagtatcagcgaccttcttgttgttgtgatgaagaaatctacagccggtatcagtatcagttgaattttataacccagatacgggcgccagaaatggcgccttttttatttgtggagtgaatatggcagtacagatttcaggcgtgctgaaagacggtgcaggaaaaccgatacagaactgcaccattcagctcaaagcaaaacgtaacagcaccacggttgtggtgaacacggtggcctcagaaaatccggatgaagccggacgttacagcatggatgtcgagtatggccagtacagcgttatcctgctggttgaaggttttccgccttcacatgccggggccatcaccgtgtatgaggattctaagccggggacattgaatgattttctgggcgctgcaacagaagatgatgttcgtccggaggcactgtatcgttttgaaaagatggtggaagaggtggcacgcaacgctgaagccgcctctcagagcgcagcggcagcaaagaaatcagaaacagcagcggcatcgtccaggaatgcggcgaaaacatcagagacgaatgcaggtaacagcgcgaaagcggcagcttcttcaaaaacagccgcacaaaacgcagcaacagcggcagaacgttcagagacaaatgcccgtgcgtcagaagaagcctccgcagacagtgaagaggcttcccgccgtaatgcagagtcagccgctgaaaatgccggagtcgccaccacaaaagcgcgggaggccgcagcagacgcaacaaaggccgggcagaaaaaggatgaggctctgtcggcagcgacacgggctgaaaaggcggcagaccgcgcagaagtcgcagcggaagtgactgcagagccctatgcgaatatagtgccgccgctgcctgatgtgtggataccgtttaacgattcactggatatgattgcgggtttttctccgggctataaaaaaatagctattggtgacgatgtggttcaggtcgccagtgataaacaggttaatttcagtcgcgcatcaacggcaacatatatcaacaaatctggcgaactgaaaacggcggaaattaatgagccgcgatttgagtgtgatggcctgcttattgagggacaaagaacgaactacatgctcaattcggaaagtccagccagctgggggaagtcatcaaacatggatgtgcccgaaaccgggacagatagttttggttttacttatggaaagtttgtctgcaacgattctctggttgggcaaacttcggctattaatatggcatcaattgctgcaacaaagtcagttgatgtctcaggcgataacaagtacgtgacaacctcatgccgttttaaaacagaacgacaggtaaggttacgtatacggtttgataagtatgatggtagtgcaacaacttttcttggcgatgcgtacattgatacgcaaacgcttgaaattaatatgacaggtggggctgccggcagaattacggcacgagtcaggaaggataagaccacaggctggatttttgcagaggcaacgattcaggcaattgatggtgagttaaaaataggctctcagatacagtattctcctgagcggggtggggcaacagtatctggtgactatatttatcttgccaccccacaagtagagaatgggccgtgtgtatcatcatttattatttcaggaggcagcgcaacgacaagagccagtgatttggttagtatccccaccagaaataatctttataagttaccatttacttttttacttgagattcataaaaactgggatattgcaccaaacgccgcaccccgcgtgtgggatatagcagcagccaataccgggcaatcagcaattgcagcaatcaacagaggtagtggtaagttatatatgagtctgtcaaacccttcaggcttgtatgttaatagtgcagcgacagatgtatttgcagagaaaaccacatttggatgtattgcaaaagctgatggtcactttcatgtggtgacaaatggtaaagcggttaatgaagtttattgtgaatataatggtgtgaccgctgataaaaatatccgatttggagggcagacgaatactggagaacgacatctgtttggccatattcgcaatttccgcatatggcataaagaattaaatgacaggcaattaaaagaggtcgtatgaaagatttaactttgaagtttcatgacaaactgcagtttaaggccttcctgtcatctcttgactgggaggaggatgaagacctccagaataaactgttagtcgatgaaattggtttcacctacacagaaacaggggtaacagaagagggagaacctgtctgtgtccggaatgacggttattttgtcaacattcgcattcttgatgacttgtttgatgtttctgtattctctgattatgtcgtggagctggaaacaccgcttcgggaatggagctgaaaggaggaaataatggatataagccccttacttcatgcgctttgtgctgtggctgcgcagatactggttggtctttttaccggaaactgggcttacggagcgatagccggttgtacgttcttcattgcgcgtgaacatacccaggcagaatatcgctggattgaaatgttcgggcatggcaagcgaatgaatatgccgtggtggggcggttttgatccgcgagcttgggatgtggcaagcctgatggattttgctgtgccggtggtggcgtgtctgctggtctggctgttggttaatcgtgggtgaaaaaaggtgagctgtatatgcaacggaggaagaaaccccgttgctggaagccaggaaaaagtatcgggtgttgctgtcctcggatgttgtgctaattgggtgataacagatcctgtgtatgggagtttccctttttgcgtgcgttgatgctggtaacggcaaacgtcatgatgaacaaaaccgcgaataagacgacaatcgtcggagctggtgcgctgtcgataaaaaaggacaaccagacaccagtcattgacactattaccgatatgccagtcgccagtaggagcgcaatatgaaagcgttgtgtcaggagtaccgcaatggcgccaggcgcaatgagcagagaaatggagagaatgatacctaccgctttcagcgtcgccacaatggtcagagagaccatgcacagcagcccataatgcagccatctcgtatgcaaaccgcttacctgcgcctgttgataatcaaagctgaacagcaaaaaatcccgccattttacgctaataacaagtgtaaccagcccggcaataatcatcgtctggattatatcgccgatggttatcccgagcatgtcgccgaaaagaatatggtcaagatgtacgtctggtttgactgcaatatacaagatcagacctgcggcaaacatgccagaaaaaacaatccccatcactgtatcttgcttgattcggctgttgtctttcaggtatcccgtcgccaccgcgcagaatactccggcgacgaatgcccctgtagccaaaggtaaccccagaatccaggcaagcacgattccaggaaaaaccgcatgactcatcgcgtcacccatcagtgcccaacctttcaggaccagaaagaccgacagcagcgcacagggtatggaaactaccagtgaaatcagcagtgcgtgactcataaaggtgaactgcagtggctccagtaataatgccatcatgagcgatcctccagcgccttatgcgcacgccgacgatttgccaaaagcccatgggtgggcgcaaagacaaatgctaaaagaaacagcagtgtctgcgccaccacgatgattccacctgtcgcgccgtccagaaagtaactgacccacgcgccgaggaaactagttacactgccaatagttacagcaatcatgagcaggcggggaaaacgatcggttaacaaccatgctgttgcaccgggagtcaccaccagacagatcaccagaaaggcaccaaccgtttgcagcgccgcaacggtcgaaaccgacagcagggtgaagaagatgagttttaatctgcccggatgcaatccaatagcacgggcgtgattctcgtcgaaaaaggtcaccataagatctttccatttgaaaaaaagcacgatgatcgagagaatgccaatgatagtgagttgcaggatatccgccggatcgattgccagaatattgcccaggacgatggtctgaatgttcacagatgtcgggttcaatgacaccataaacagccccaggccaaaaaaggacgagaagatcagaccgatgatggcatcttcttttaagcgggtgcgttggttaagaaacagcatgctgcccgcagccagtccgccggaaaagaaggctcccagagaaaacggaagccccagcatatatgcccccgcaacacccgggacaatagagtgcgacaacgcatcgccaatcagcgaccagccttttagcatcagatagcatgacaggaaagcgcagagaccgccgaccatcgccgagacccacatcgcattgagcatatattcatagctgaagggttccagtagcacgttcatctttcttccctctgcaccgctgacggtcgatgagccacaaaagggcgttcatcgtcagtaataatgctttcttccgagccgttaagtgtgacatggcgcagtacgccgctaaaagccagctctaggttctcggctgtaaaagtggtgtctgtcggcccgcttgccaggacggtgcctttgaccatgaccgtataatcgcaaaatgtcgtgacggatccgagattgtgtgttgagacaagcatcgttttgccttccgcgcgtaactccctcaacaggctgatgattttggcttcggttttcacatcaacgccagtaaaaggttcatccagcaggatcacatcaccctgctgtgcaatcgctctcgccagaaagacgcgtttcttttgtccaccggaaagctcgccgatttgtcgatggcgaaaattcaccatatcgacacgttccagcgcatcggtgacaatttgacgatccctctttttggcgatacgcaacatacccatatgcccatagcggcccatcatcaccacatcttccaccagtacaggaaatgaccagtcaacatcttctgactgagggacgtaggcaaccaggtttttctgtaacgcctgtcgcgtgggaatacccagaacagatatctttccgctggtcagacgcacaaatcccataatcgctttaaacaacgtcgattttccggaaccgtttaccccaaccagagcggcaatagatccacttggtactgtgaaggatgcatcgcgcagtgctgtgtgcccgttacgccaggtgacagtaacatcattaacgacaatgcctgcagattgcatcattatttctcccttttcccagctttaattccctgtaccagcgtactggtagtaaccttaagaaggtcgatatacgtcggtaccgggccgttttctgtgctcagggaatcgacatagagcacaccgccgtagtgtgcgccggtttcacgcgcaacctgacgcgctggtttatcggaaatcgtactctcgctaaagactgccgggatatgatttttcttaactatatcaacaaccttacgtacctgctgcggtgttccttgttgatcggcattaatcggccacagataaagctcttttagccccaaatcgcgtgcgagataagaaaaagccccttcactggtgaccatccatcgctgattctcagggagttccgtaatctgcttacgcaggggggcaagggtttgggtaatcttggctttataagtatcggcattgcgttggtaggtttgtgcatttgccggatcgtattttatcaacgcatcacgaatattatcgacgtaaatcagagcattatctggcgacatccatgcatgggggttaggtttgccctcatagggtccttcggtgatccctacaggcgtcacacccgaagagacaattacttctggaaccccattgagatgctggtaaaagcgttggaaccacaattccagattcataccattggcgagaatcagttgtgccccctgcgcacgtttaatatcgccaggggtaggctgatactcatgaatttctgcaccaggcttggttatggatgagacttctgcagcatctcccgccacgtttttggccatatccgcgatgatggtaaatgttgtaatgaccttgaatttttcagttgcacttgcctgaaatgcgatcgagcaggtgagtgcgaggccccccaagagcatggttactttttttatcgagtgcataatttagtacctatagtgagcaaaattagaacaaacatagcaacggctatgttttatagcacaacctatacaaaatgaaaatgattatcattagcggttttgaggcccaaaacagggattaggttgtttccggctggcgacgcgttattgaggaaaaaagtaaggcagctagtaggctttgaaataacgttttgcggttggctgatgcaatttcgagagtgcatgtattgaatgatttctagccgttactgattttcgtattttttgtatgggaggatttgcacctctccccaccgagcctccatgactttactccactgtctctagggctgctgtgtgccaggagcggaagcaggggggccagagactccttaaaagttgatagctcgttttgcagggagacttacacggtaagcgttattccgaagagcttaaaattgaagcagtcaaacgggttgttgagcgtgtttatgcgctgccatctgattaatcgacggaagcagttccgtttggtctatgatgcagttgtccggcaggcgctctgtgacgcaaaagaacgataggagtagcattgaagtgaacgaggttatgcttgtcttatattatcctctattttaaaaacatcagctggttgtgtaagagtttttattgttttatcttgttgactttgcttttatgaaaacagagtgattgatacaatgaaaaccttaagtgggaaagagtttaggaaattatttaatcgttatgagacaggattctatctaagtgagtttgaatacttaaaggactttgatcctttgtttcctgaatgcgtagggaaagaattaaagttgggttataaacgaaaagttgatgtatggtgcgaagaggatgctgcgctatatgcagaatttatagctacaaaagaaaggctgaaaagaggccggttaatcctaaaaataaaccaagtgtggtcgcgtgtatatcctgcttatatttatgcaattgaagaaagaataaatgtcagggcaaaggggagagagtcatttaagtatgaaactgtgcaagaaaaacaatgtaaactttccataatgttagatggtctgaaagaccttgaatgtgaaatagctatgatttcaagtgagtttgaaattgaaaaacactctatgcactatttttatatgatttttgatattgaacgctatataaatgactgcagttactttgttttttctgctgctaaagttgttaaaggcgtgattcaatgcattggttacattgacaaaaataacaaagcaagttgcgatgaattttattcaggcagctatgaatgcttggatgatgatcaggaaacactgaactatttaaatgaatcatgcgcagagggtatagacgctgataaagatctcatcaggaagaatgagttattagccttatccctgaaggaattgtatcaacttctcgtttcaaaaaaataacaagtaatacggcgagcgatatgacgtgccatgggatatccgcacccagcagcatgttgtctccacgatgtccgcagttcgctcataatagacattcactacagttatagtagaaggtatgcatgctgctgagtggggaaagtgtgaaagaaaagaagacagctgctttgtttgtcgtcacgtttatcttcattggctatgcaagtcgtaatacaaggcgggacaaaactgagacacataaggcctcgcaatggcttgcaaggccacacatgtattgagatgttaataaaatgtagacttgtaattttgatataaatggtagagaaaatctttccccaaaataaaaacgaacgtcaatgaaatcaaacggttgaataaagttgattttggctaatacaaagacaagaaaataatatttatgattaaatatcagcgagttgaatacataatttttatatactgctgcgccacatggggtgggttgaagcggctgacttaattgttaaaggtatggaaggcgcaatcaacgcgaagaccgtaacctatgacttcgaacgtctgatggaaggcgctaaactgctgaaatgttcagagtttggtgacgcgatcatcaagaacatgtaatctctacatgtgttaaatattgaaacgggcgtataacacgcccgttgtttttataaatatgttaaccgttataaaataacgtatcaaaagtcaagtgaacacatttcaaatatcaatttgatcgtattggtctggtgattatttatggggagcaataaaaagacagtattaatcatccatagggatagtctctgcacttttatttccattatgctaatgccttactgaattatgaagcattttttaagctcccaactttagctagattaatggtttattattttctacatcttcaatatataaaagcgtattatcaatggcgtagtaactgcgtttgttatgattaacatcagtaacccaccggaaaacgcctgcgcctgccagtgttgaacagtattcccgaaatgtagattttccgcgaatatgaagcaatgcggcctcttttattttagctgggttcttggtcgtactaacttttaacaggttcctggttcctcttaataacaaaaccgtgtcatcgtgagtaataattctgatgttatccgtagccagataataaatgtaatgtgcaatacggtgatgttttaattctgaataaaaccaggagaagttttgctcttttctcacttgctcaaacatcttttgaaaaacaacgacctgatccatcaggataataacctcttgttaggtgtgagactgcgtagtgtgcacgatcggttttaccacttcaatctggtctgtcctttggctgtgatatgtacaaagtgtgaaagggggattacctgaattctcccggtgggcattttgcaacggaccagctccgctacaaacgctggtgtgggttcagattataacattctgtctaaggggcgggataaaggtgaatttagggggcatgaaagatgactttataaccttgctcaccccagtgttgtaaaagttcgttttgccttctcgttggtgccatgcctgtccagacaatcaatgtttgcgttgggaacagttccgggcgcggcgattcaatgggatcagcaagaacagaaatgtgccatcctgacaatgataaacgccatgcttccagccacaatcgtgctctctcttcaacattccacgccatcagaatggcctctttaccgggcttacggcgcatttcgaaaagtaaggccgctgcgtattcaattaatgcgccgtcaaacatactgctcataatgcgggaggtgttgtgatcaagcacgagacgctggcgaacaggaaggtaaacatgattaatcaattgatctactgggtactctcgacccagtgaaataattcgcgcgcgtagtttggctggattagccatacgaagaattgacatcatctcttcttgcaggcggctccagtcatcttgcgtatcctggctggtagtttccagtaatgctttaactttgcctacaggaacgccattacttatccaacgcttgatctcttcgatgcgttgtatgtcttcttcatcaaagagtcggtgtccgccttcactgcgctgtggttttaacaaaccgtagcggcgttgccaggcccggagagtgacaggattaatcccgcaacgttcagcaacatcaccaatgctgtaataagccacaattcctccttgcggtcataaatctccgtcgcctctacacgacccaataatactttgtacaatatacgctgaaattgtacaaagtataaataagatttcagctaaattggatgaaacattatttttaatgtggattaaattaaaacataacgtattcattttcacgatgatttccagaaatcatgcgaaataatgtgctgaaaattattttttctccggccacgcaactgaagggataccattcaatttagctttggaaaacagatctccctgaaacatctcaattcctgcagattcaagccacatccactcttctggtgttgccacgcccatagcagagacttgaatttcaagtgatgtacagcatttcatgatcgcctgaataattgcctgccgtggtccgcttttatgaacattggtaatcaattcctgactgattttaattctgtcaggctggaagcgtgacaggagtaacaaaccagcaaaacctgcgccaaaatgatcaattgctacactgataccggccgcctttagcgatttaaccgcttcggcaaactcatcaaaccgagatatgacttcactttcagtaaattcaacgatgatttgttcaggtaccagagcattggcctttatttcatcaagtaaaaaagagactgcgtcaggtttgttaaccagggtcataggtaatagattgattgaaatcattttatcaccgagcttaagtgcgtgtgccatcgcaaatgcaagcgccttacttttgagatccgctgtgtagatttcctcgtctttacgctgcccaaccgctatagctgacgggctgtcttcatttttttgcacaatggcttcaaaagcgattatccgccgcgataaagggtcgacaataggatgaaaggcaaagtggtcgtttatatttgatgaaagggtacaagaatcaagttctttatcagatccgtcagcgataaaaagccaggagtcttcagcaggaatctcgaaataggttgattgttcagttgcaaggacaaaagtacgaaaaaattgtagcgctctgtcatcataagttagctgaaattttgatgtgcctttgtcgaatacggcctgtaaaacgtcatctcgctcgtgcaggcgtaaatcaaataattccattcctgctttgccaaaacggcgagcaggcgcgtaatcgcacaacagttcaacaatattatagtgccgtggatcctggcatatggcccgatatatcatttgaacctgttcttccggaccttccagaagctggaaaaaatgagaaccattaaacagtaagatccctgttacgtcagaccgcatgttcctgcgatttgctatcgaaaccatttcttcaatttttttgacaggttcgtcgccacgtatatggctacgataaataagggtggtaagcattaacaatccagggtaatgggcgaggcgagagtaagacggtaacagacatatcttcttgtgtctttcttttaataccaaaacataaccgtttctttacattgataaaaagtggaaaaggttgaagacggtttggcgaaaaaacctgtataggttgtcatttaaatgatgcaatatgttttatcgtaatgcattgttttatatgaattagcactaattgcgaaaaattaatttatcattctgtacacatatttcgtacaagtttgctattgttacctcacttaacattgattaacatttttaacagaggcgtagcatgcatcaaaattcagtgacttcagattctgcaggagcaatcactcgttactttgcaaaagctaacttgcctactcagcaggaaactctcggggaaattgtgactgagattttgaaagatggacgtaatctgagtcgaaagtcgctttgtgccaaacttctttgccggctggaacaagcgacaggggaagaggaacagaaacattataatgcactaattgggttgctttttgaataatgcaacagcctgattatttaacaggttagctatgaagtcgttatgaagacatctgataatgaaagtataaaatatgaaattactggccaggcggtgctccagatactgcgcatgaagataaatttttcgttgcagactcttattaagcaattactcgtaatgaaatcggctgaggaaaatactttccgacgagatttaattgacagcataattcgtgattttagcaacagtgatacaggagggccaaaccgaagaacagcgatagctgacaataaaagtatgttcactggtaagaaaataaacagaatacattaaaatttcataagtaagatgagaggttaccatgcttgaagatactactattcataatgcaatatctgataaagcgttatcaagttactttcgtagttcaggtaatttgttagaagaagagtctgctgtgttagggcaggctgtgaccaatttaatgctttcaggcgataatgttaataataaaaatattatcttaagtctgatacactccctggaaacaacaagtgatattctcaaagctgatgtgattagaaaaacactggaaatcgtgttgcgatacacagctgatgatatgtaacttttaattataaagtataagtttatagaaaactcattcatcttatttttgtctgtcgctttagactatacacagcataattttattggatcactattcctgcgaggctgacatgaataattcaatcccagagagatttatttttcaatgtgctttgtttaaaaatctcgagagggaggtgttcatgacacatggatatgttgatagtcatattattgctcaggctttacgcttgcgtttaaaagatgagaccagtgttattctttctgatctctatctgcaaatcttgcagtacattgaaatgcataagactacactaacggatatcattattaatgacagggaatctgtgctctcttaaaacttgagtaaggtttttgaataaacatcagctgtatcactatgctgatgcaaagtgagcatttcaggcgttatgctttcttaatatatccgcaatatcagagggcaaacaggaatggagagcgctcgttttccattcttgacgcctgatatcccgcctaatttgtttaattctgcctacattgtgctaaaaaattaataggctagatgaagttggagaaaattttatcttcggcgtggatatttgtgatgctctctaccatgctctctgtagacccctgcgcgagcgaatgaacgtctctttagcttctacagacttatcgataaaggctttgggattttgatatttattctgttaatcgcctgcgccgctgccttcctgcttgataggtatttcaataaaagcgcaacgcctgaagagatcctgcgacgggctataaataatggggagatcgtccctttttaccaacctgtggtaaatggtcgggaagggacattgcggggagttgaggtgttagcccgctggaaacaacctcacggtggatatatatcacccgcggcatttattccacttgctgaaaaatgcggattaatcgttccgcttacgcaaagcctgatgaatcaggttgccagacagatgaacgctatcgcgagtaaactgccggaaggttttcatattgggattaattttagcgcctcgcatattattttgccgacgtttgtcgacgagtgcttaaattaccgtgacagttttacccgccgcgatttaaaccttgttctggaagtcaccgagcgtgagccattaaatgttgatgaaagtctggttcagcggttgaacattctgcatgaaaatggttttgtcatcgcgctggatgatttcggtactggttactcagggctttcttatctgcatgacctgcatattgattatatcaaaattgatcacagtttcgttggccgcgtcaacgcagacccagcatcaacccgaattctggattgtgtattggatctggcgcgtaaactttcgatcagtatcgtcgctgaagatgtcgaaacgaaagaacaatttgactatctgaaccaaaataatatcacatttcagcagggttattatttctataaacctgttacatacatcgacctggtcaagattatcctttctaaaccgaaggtgaagattgtggttgagtgaaaattgatcagcaaggccatggtgcggtgtaattatagacagctaattagctcgttgcctcttgttactattgttcattcttttgtttgctataattgtgtgaaagttttgactggattgccattagtagcatgaacaatagtaataatctggattatttcactctctatatcatcttttccattgcatttatgctgatcactctcctggtcatccttattgcaaaacccagcaccgggctgggagaagtgcttgtgacgataaatttgcttaatgccctggtttggctggcgatcaatctggttaatcgattaagggaaagactcgtcagccacagggatcagcactaatctttcagtttctcactgccagtatgcggctgaatgggttgctggcagtgaacccctggatcattgaaggaaaggaattattgcacaaatagttgtcaaccctggtgttatcacagttgttttatatatcagtgaaataatttccatggcaactgttgataattttgatgtcgaagagttatttgttaaacaaaatagttaccccaaagtgatcaatgtcatgaaaataagctaaaaatgataatgctggcttatttatcatttaaatattgtcgctgtttatctatttaaatttcttgtgcttttgtttttatctttgccttccgttttggtaatctgaactcataggttatttgaccaggaatgtttgttaatccaatgaatggatggttaatctatgaaactgaaaaaactccccggatttagtttaggacttattgctctggcggtgggtaatgcatatgtaacacaattgttggatatttatagtataatttcctatataaccgatgaagaatcaccgattgaaatcaaaaataatacttctacaagtaatggggagtatctaatcacttaagacgaaagccatgctgtgaaagtggatgacggtgtaactggatatatacataatgccagtgtgatgactagtggtgatggatcttatggtatttctgttgatagccaaaacaaagtattatatataagcgatagcaatattaagacgctctgaaagcgtatctgacaaagaaaatggagggataacagccagcgcagtagtcagtgaatttggtggcaccatcgttatgaatggtgataattcagtcgagacgagggggcatattcagcgggacttttaagtcagattaatgattctgggactgtggaaaataacaccagtcttgaaaccacagataaaacgaacattgttacctatggggaaaatgcagtaggagttcttgcatgttcaagtcctggagagtctcgaacatgtgtcgatgctgtagatgatgaagtttgtgattctaacagttacgaagttattagccgtgctgatttaaaaatgaatggtggttccataacaactaatggtattaatagctatggtgcttatgctaatgggaaaaaagcatatattaatttagattatgtggtgcttgaaactgtggctgatggaagttatgcagttgctattcgacaaggtaacattgatataaaaaagttctattacaacaaatggcactaaagcccccattgcaaaaatatacaatggtagagagttatttttttccaatgtcacttcagaatcaacagaaacgcctacccccgtcctgcgacccgaagctggcagttacgtcgccaacctggcagccgctaacactctttttgttatgcgtctgaacgatcgtgcaggtgaaacgcgctatatcgatcctgtaactgaacaggagcgttcaagccgattttggctacgtcaaattggcgggcataatgcctggcgtgacagcaacggacagttgagaacgacctcggcacaggccatctggatgggcgtcgatcataatgtgcacacggaagccaatggctcacgtattgagaatgacgcaaataacaatatccagacccgacttggtttccacacctttattcgtactcaggagaaaaacagcggtccgcacggtgacgactttgaaccttttgttgaaatgaacgggatccataacagtaaagattttgctgtctcaataaacggtgtgaaagttgaacaagccggggcgcgtaatctgggggaaattaaacatggcgtaaatggcaatctgaatcctgcggccagcgtctggggtaatgtgggcgtgcagctgggtgataatggctacaatgacaacgcaatgatggtgggcctgaaatataagttctgatcccgccattagctaaaaaaccgcgtcgaattcatcgacgcggtaacatatgaaatattattttttgccgatagcacgcatggtgtcatcaattgccgtgatcaacagcatttgcggatctttagcgcaaacctgattcagtttttctaccactttggcgctcagttccggagattgctcaatttttaaatcacggctggcaacgctggcattacccattaccgcaacaatttctgcaacctgtgcgctgtcagtttttgccatttcgttggcttctgcgcaagtaatataggtttctgatggcaaaccgttcttaatattgtagtcctgcgcccaggtcattggtgcgaaaacaaacagacccgccagtaaagcaaattttttcatcatcattccttatttcattttacccagaattgcaccacccgtaccgccaatcacggcacctttaatcgccccttcgaggccattgccggtcagaacgccagtgacagcaccaacggcggcacccacttttgcacctttacgcgcatttttaccatcgcggcctttttctgttactgcaccaacaccagcgccaacagctgcacctttcagtacgccattaacaccattgccagtaagtaaaccaacgcctgcacctagcaatgcacctttcgtggtgcgattcatatccgccattgctggcgtggagcagaacaatgctgagataagcccgaaggcgagtatttttttcttcaacttagttgtccggtattaagtaagttgcacacacaataatttcgtcttcaattaagatctgcttaactaaagaacgctcgctattattcagataattcaaaatgagcgtgactgtgatgataggaattatgttttttacgggaatgagaataatctcaaataagaaataactcattgattgacaatatttttattcaagaagtgtcattggctgttaatacaatgttgtaaaggtaagataatctgatttatcaatattattgtgtgattgttatgtgagcagaagatattcattagcaacgattacattagtcattttattttgtggacggcctcattgtcgaaaaataagcgtacgacagtattatcagaacagagtgattttttatccaacaacacttcagcgcactgcgtttaaaaaatacctctttcttatacgggatatcatcatttcatcatgatgtctttgatgagcggtgaacacaatacatttgcgctgtctcttcaggatgaatcccctggtctggtgcctgcgggctgatgttgcagcagagctaaggtcacttagacgctactatcatttatccaatgcatggaatcgaaatcagtcgatacccgcagtatatatcgtgaactgggcgcaacgctgagttacaacatgcgtctggggaacggtatggaaattgaaccctggctgaaggcggctgtgcgcaaagaatttgtcgatgataatcgagtgaaagtgaatagtgacggtaattttgtcaatgatttgtcgggcagacgtggaatataccaggcaggtattaaagcctcattcagcagtacgttaagcgggcatctcggggtggggtatagccgtggtgccggtgtggagtccccgtggaatgcggtggtcggtgtgaactggtcgttctgaccatcaacgattaaactgcgtttcggcgctgtttttgtttaccgggtgctaaaagggaaaattctggggcaaaaaaaagcccgtcagttacggcgggaaacctcatcctatgggagaacaatgaataatgaaattgcggggttatcatctcccaggatacccatgctaacgataaggttatttactcaaccaggcgtaaacattttgttctgtgcgtgggaacagccttaaggtgtaaagggggagggggaaatagcaatgaatagtatcagcaagaatactcgccgctttaccacaacgtggatgagagggatgaaaaactcaaggcagagatgactctgccttgaagataaatgcgcttttacagggggcttatttcagctcttctgcttccggtaaggtcacgttcagctcaagaatagaaatatcgccatctttttgctcaagctgtacggttaccatctcaggatcaatttgtacatatttacaaatgacctcaagaatatctttacgcaactgcggcagataatgcggttctgcatcgctgcgacggcgttcagcaacaataatctgcaaccgttcttttgcaatgttggctgtgtttttcttccgcgagagaaagaaatcgagtaatgccataacttatcctccgaacaagcgtttgaggaagcctttcttctcttcttcaatgaagcggaaaggacgttcttctcccaacagacgttctacggtatctgcgtaggctttacccgcatcggcgttaatgtcgagaatgaccggttcaccctggttagaggcgcgcaatactgattgatcctctgggatcacgccgacgagtttgatgcgcaggatctccagcacatcttccatgctcagcatgtcacctctgcttacgcggcctgggttatagcgcgttaacagtaggtgctctttaatcggctcttcgccattttctgcgcggcgtgatttcgacgccagaatgcctaaaatacggtcagagtcgcgtactgaggagacttccgggttggtggtaataatggcttcgtctgcaaaatagagtgccattaacgcaccggtttcaatccctgccggggagtcacaaacgataaattcaaaatccatcgctttcagatcatcaagaactttggcgaccccttcacgggtgagggcatctttatcgcgagtttgcgatgccggaagaatatagagattttcagtacgtttatctttaattaacgcctggtttagcgttgcatcgccctgaatgacgttgacgaaatcgtaaacgacccggcgttcacaacccataatcaggtcgagattacgcaggccgatatcaaaatctatcacgacagttttctttcccttctgggccaaaccagtggcgatggccgcgctggaggttgtcttaccaacaccccctttgcccgaagtaacaacaataatgcgtgccatagaaattccttgttaaaaagggatcaatttaacggttgaacggtcaaagcgttttcgactaactgcagtcgtgccgctttgccataaaattctgctgggatttgatcactcagccagtattcacctgcgatggacaccagttccgccatcaggttcgtacaaaatatttgcgtttcccggtcaccacttgcccctgccagcgcacgaccgcgcatcatgccatagacatgaatgttaccatcggcaatcaattcggcccctgcgctaacgtggcttgtaacaatcagatcacattgtggagcataaatacgctgaccggaacgcactggggtatcaattaaacgcgtttttgtgaccggcgttgtattttgcgctggagcctgcggtgcgggagctggacgcggcgctttttcctttccttccgtcaggataggcagccccatcttttcaatttcggctttaagttgcgcatctttgcagccacttacgccaataacccgcaaaccggttgccgaaaccgccttatgcatcgctgaccagtttaccggggcttccagtgcactgacgttgagtacaacgggggcatgttttaaaaatgcgggggcctgagcgattttgtcttccagcgcctgatggataaccttaggttctgcctcatgcagatgaaccacagataaagtgaagctactgcctttaagctcgattggcgtgtttgacatcctggccttactcaattagctattaatcatcgccagcgcgcgatgatgttccgaagactataaggcatgttatagtctggattatattgaggcaagtcaccctcccatttattcagagtaaaagtctattctgtgataaatggcgctgattcatagcttaaaaaatacccttgtcaatcaacccattgccgtcgtacttttgattgttcttatttacgcttcctttttccgcaccctaatcgtgacagcatcttcagacctgtttaaatatccagtgttgaggcgagtgtattttttcaccacgccaggctttcttaactttccattttttgcagcatcattaaagaacagatacccgttatcttaatatccgccacagaattgctctatcatagaaaccgcagaagacgtctgatacttctgtcaggtcatcgtaactcgtccaggtcagcggttttgattacggattgatgatgaaatgagcataagtgttgtacggttggattatcaggatgtgctatgaatatgatgcgtattttttatatcggattgtcaggtgtggggatgatgttctcatcaatggcgtctggaaatgacgctggcgggcttcaatctcctgcgtgtggcgttgtttgcgacccgtatatttgtgtgagttcagatggcatttccccagagttaacaaggaaatatctcggcgaaaaagccgctgaaaacttacaatcattacaaggctacgatcccagcgaatttacattctctaacggtgtattttgcgatgttaaagaaaaattatgtcgtgatgatcgttattttggtgtggatggtaagcggagtggaaaaatcaatcaaaccaccacaaagatgttatttatgtgtcgtgagtgatgtcttgtttacattatgttctattcggcattgtctgctattcgtcattaacctattaagcgacagagaggagtggggcgttaacgtttatgacggggagagtccccgtcggttgatatttacttaatttgaatatcgacgttatattttttagttttgtttttacgggcgtcgtttcgggtttgcagcactcgcagctcatatttgccagaagcagggagtgagtattgtccgtgactatcgagttctggggaatatctggataaatcaacagaatcatcgattcctggcccgaagaggtaagtatcagcgccttcattagagatactcacgtgcactttctgaccttttttggcatagaaggtatatgtatcgtaatcgtatccctttatttcgccggagtactgagcgctgctatggccttttctgaactcaacattgacattcttacccgcagcaaagctcgtggaggttagcagtgcaagcaacaatacagccttactgatgcccttaattttcattggtagtctcctgttcagaatgagtacgatgaactgttataatataacaatccttcacgggagaattccagtggctttcctgtgttcggttaaatcccggcgcggcatttttgccggggggattacttataaagggggcatggactgaacaaaccgtagaaatctacagctggctggcttgtggcgcgggtttcattgatgttagcttatgccaaaacctggcatcttaaagagtaaaagtatgttttgtgtgatttatcgaagcagcaagcgtgaccagacctatttatatgtcgaaaaaaaagacgatttttcgcgtgttcctgaggaactgatgaaaggttttggtcagcctcagttagcgatgattcttccgctggatgggcggaagaaactggtcaatgccgatattgaaaaggttaaacaggcattaaccgagcaaggttactatttgcagttaccgccaccacccgaagatttgctgaagcaacatctttccgtcatggggcagaaaacagacgacacgaacaaataaccgatatccggcggtggcattatctttgtcggcgcgggttttcatatccacgataaggtgaggggaacgttatgtatcaacatcacaactggcaaggtgcgctgctggattatccggtgagtaaagtagtctgtgttggcagtaactatgccaaacatattaaagagatgggcagcgcagtacccgaagagccagtgctgtttattaaaccagaaacggcactgtgcgatctgcggcagccattggcgatcccatccgatttcggttcagttcatcatgaagtcgaactggcggtgttgattggcgcgacgctgcgtcaggctacggaagagcatgtccgcaaagccattgccggttacggcgtggcgctcgatctgacattgcgtgatgttcagggaaaaatgaagaaagccgggcagccgtgggaaaaggccaaagcgtttgataactcttgtccgctttccgggtttattcccgcggcggagtttaccggcgacccgcaaaatacaacgctgggcctgagcgtaaacggcgagcaacgccagcaaggtacgactgcggacatgatccataaaatcgttccgctgatcgcttatatgagcaagttttttaccctcaaggccggtgacgttgtgctgacaggcacgcctgatggtgtcggcccgttgcaaagcggtgatgagctgacagtcactttcgatgggcattctttgacaactcgcgttttgtaatactttttgccgcctgaaagcggcggcaaaacttgcatcgctgtgccagactggttataaggtgcgttttaacgtaatggcggaacacctgatgagcgatgtacctttctggcaaagtaaaaccctggacgaaatgagcgatgcggaatgggagtcgttgtgtgatggttgcggtcagtgttgcctgcataaactgatggatgaagacaccgacgaaatctacttcactaacgtcgcctgtcgccagctcaatattaaaacctgtcaatgtcggaactacgaacgtcgtttcgagtttgaacccgactgcattaaattaacccgtgaaaatctgccaacattcgaatggctgccaatgacctgcgcttatcgtttgctggcggaaggtaaaggtttacctgcgtggcatccgctacttactggttcgaaagcggcaatgcatggtgaacgtatctctgtgcgtcatatcgcagtgaaagaatcagaagtgattgactggcaggatcatatcttaaataaacctgactgggcgcagtgataaatttaatagatgttgatgggggctttcttaatatacgtctggatgctcgccattttgtagccctgtttttgaaagcgctctgtcataatgagagttacccgatactttattatcaacaggtaactctcaatctttaaaaaacgtctgtatttttaaatgtgataaattttataccttgagtacatagagagaataatcgcttatcagacttcaggtatctcaaagagtgtcttcttaccgtgtcttttctgatactcattacaggtgttaatcattttttgggccgcttcttttagtaaagaaagcattaaatcatcataatcaacgtagaatctggttgtttcagtttccgtttttatcaccccgatggcggctatttcggtagttaatttcaatttggcggcatcgatatctttattcgcttgtttaaccgtgttagacagggtggtaaagaaactcagcgcagattttaacttgttcttcaattctggaatcagtttcccttcaactacgcccgcagcaatagaacacagtttcttgatgccgtcatccagtaccttaatgagaatgcctttctgggcgaatgcttcgattctattttaaaccaggtgatatttttcctttctgctggatggacgctgtcgcaagaaggccgcgtgagcacaggataagagaacgaaaaatcagcagtctatgcagcgacaaatattgatagcctgaatcagtattgatctgctgacaagaacagactactgtatataaaaacagtatagcttcaggcagattattatgttgtttatcaagcctgcggatctccgcgaaattgtgacttttccgctatttagcgatcttgttcagtgtggctttccttcaccggccgcagattacgttgaacagcgcatcgatctgaatcaactgttgatccagcatcccagcgcgacttatttcgtcaaagcaagtggtgattctatgattgatggtgggattagtgacggtgatttactgattgtcgatagcgctattaccgccagccatggtgatattgtcatcgctgctgttgacggtgagtttacggtgaaaaaattgcaactacgcccgacggtacagcttactcctatgaacagtgcgtactcgcccattaccatcagtagcgaagatacgctggatgtctttggtgtggtgatccacgtcgttaaggcgatgcgctgatgtttgccctctgtgatgtaaacgcgttttatgccagctgtgagacggtgtttcgccctgatttatggggtaaaccggtggttgtgctatcgaataatgacggttgcgttatcgcccgaaacgctgaggcaaaggcgctgggcgttaaaatgggcgatccctggttcaaacaaaaagatctgtttcgtcgctgtggcgtggtttgctttagcagcaattatgagctttacgcagacatgagtaatcgggtgatgtcgacgctggaagaactatcgccccgcgtcgagatttacagtattgatgaggcattctgcgatctgacaggtgtgcataattgtcgcgatctgactgattttggcagagaaattcgcgcaacggtgctacaacgtacccatcttactgttggtgtggggatcgcccagaccaaaacgctggctaagcttgccaattatgcggcaaaaaaatggcagcggcagacgggcggggtggtggatttatcaaatctggaacgccagcgtaaattaatgtctgctctccccgtggatgaagtctgggggattggacggcggatcagcaaaaaactggacgcgatggggatcaaaaccgttctcgatttggcggattcagatatccggtttatccgtaaacattttaatgtcgtgctcgaaagaacggtgcgtgaactgcgcggtgaaccctgtttgcaactggaagagtttgcaccgacgaagcaggaaattatctgttcccgctcgtttggtgaacgcatcacggattatccgtcgatgcggcaggccatttgtagttacgctgcccgggcggcggaaaaacttcgcagcgagcatcaatattgtcggtttatctccacgtttattaagacgtcaccatttgcgttcaatgaaccttattacggcaatagcgcatcggtaaaactgctgacgcccactcaggacagcagggatatcattaacgccgctacgcgatctctggatgccatctggcaagcgggccatcgctaccaaaaagcgggcgtgatgctgggggatttcttcagtcagggagtcgcgcagctcaatttattcgatgacaacgcaccgcgccccgggagtgagcaattgatggcggtaatggatacgctgaatgctaaagagggcagaggaacactctattttgccgggcaggggatccagcaacaatggcagatgaagcgtgccatgctttcaccatgttatacaacgcgaagttctgatttactgcgggtcaaataaacatagcggcaggaaaaagcgctcccgcaggagcgccgaatggattagcgaccgaacaggtcacgttttttcgctttaaacggctgggaaatcaccaccagcaccgcgacaatcaggtaagcgataaaaataccgagcagccactgcggcatttccagacctaaaaattcccactgacgctcggcgcaatcgccagaggcgacaaacacttgcggcacccatttatccagcggcagccattccgggaaacgagccataaaatcacaggtcgcaaacggcgaaggatagagctgaagcatggtgtgctcgtaagttaactgcacaccgcggaacgcactatacaaccagataaccatcgctacataacgcagcggagttttcggggcgatcgcgccaatcagcgcagcacccagaacgccgaataacgcgcagcgttcataaatacagagcacgcaaggtttcagtaacatcacatgctggaaccacagcgccgtcagttccagtgccagagcagtaaacgccatcaacagccatgcgccccggccttgtgaacattggttcaaaaatcgcaacataatcatttccctgcaatatgcatagagtgcgcagtttaaaccaattcattcgctgcgccaccaggaggcagcaaaaataggacgcaattggacaattatcgggcgaaaaggcaaaccgggcatttatatgcccggtaagttgttatcaaagcgttgctatccagcccatttgcataaaccattcggttacaggagcaagcgtaaactcgacgcagagcagcccgacgagtgtcaggacgagggtgtaaggcagggccatccacaccatgcggccataagagagacgaatcaatggcgcgagtgcagaggtcagcaggaacaggaacgcagcctgaccgttcggcgtagcgacggagggcagattggtaccggtattaatggcgaccgccagcagctcatattgcttcaacgtgatagcgccactttccattgccgctttcgcttcgttgatataaatcgtccccacgaagacgttatccgaaatggatgacagcagaccgttgaaaatatagaacaacgacagctgagcatgttcagatgcctgcaacacaaactgaataatcggcgaaaacagttgttggtcgataatcaccgcgactactgagaaaaacaccgtcaacagtgcggtgaatggcagagattcggtgaaggctttaccgatagcatgttcatcggtaacaccggtcaatgatgtcgccagaataatgaccgacaaaccaatcaaaccgacttctgccagatgcagtgccagcgcagtcaccagccagacgccgataatcgcctggacaatcagacggattttatcctgacgggtacgctggttgcggctttgatcgtcaaactgttgcagcacttcgcggactttctccggcagcgtttcaccgtagccaaaccaacgcagcttctctaccagcaggcaggttaacaggccacaaatcagaaccgggacggtcaccggcgacatgcgcaggaagaaatcgccaaaatgccagccagccgctttagcgatgatcaggttttgtggttcgcccaccatggtcatcacgccgcctaatgcggtgccgacaccggcatgcatcatcagactacgcagaaagccacggaactgttccagaaccactttgtaatgcttgtcgatatgactatcgtcttgcaggtcggtatcttcagtacgggaagaggctacgcggtgataaataccataaaaaccgactgcaacgctgatcaccaccgccacgacggttaaggcatcgaggaacgcggagaggaacgccgccgccacgcaaaaagagagcgacagcagcattttggagcgaatacttaacagcaaacgggtaaatatgaacagcaacagctgtttcataaaatagatacccgccaccataaacatcagtaacagcaagacttcaagatttgccgccacctcttcacggacgtgttccgcgctggtcatgccgatgaatactgcttcgatagccaacaaaccaccggggagcagcgggtagcatttcagggccatagccagagtgaaaataaattccgctaccagcaaccagccagcgacgaaagggctgatgaggaaaattaacggatttacgattaagaaaatgatgagggcgagtttgtaccagtcgggggactggcccaaaaaattgcgccatagtgcgcggccccaggagatctccatgatggtttcccttaccttagaaataatcaatgatgtttttatgtttaaacgcaaagcttaacggtcagacaggagtgaggcaagtcttgatagtcaaggggaaagagatgcagaaaatgaagccttgatcccttttttcttctttttgtcttctatcagcgtagttagccctctggtatgatgagtccaactttgttttgctgtgttatggaaatctcactatggtcattaaggcgcaaagcccggcgggtttcgcggaagagtacattattgaaagtatctggaataaccgcttccctcccgggactattttgcccgcagaacgtgaactttcagaattaattggcgtaacgcgtactacgttacgtgaagtgttacaacgtctggcacgagatggctggttgaccattcaacacggcaagccgacgaaggtgaataatttctgggaaacctctggtttaaatatccttgaaacactggcgcgactggaccacgaaagtgtgccgcagcttattgataatttgctgtcggtgcgtaccaatatttcaactatttttattcgcaccgcgtttcgtcagcatcccgataaagcgcaggaagtgctggcaaccgctaatgaagtggccgatcacgccgacgcctttgccgagctggattacaacattttccgcggcctggcgtttgcttccggcaacccgatttacggtctgatccttaacgggatgaaagggctgtatacgcgcattggtcgtcactatttcgccaatccggaagcgcgcagtctggcgctgggcttctatcacaaactgtcggcgttgtgcagtgaaggcgcacacgatcaggtatatgaaacagtgcgtcgctatgggcatgagagtggcgagatttggcaccggatgcagaaaaatctgccgggtgatttagccattcagggacgataatccttccagacggatgacaaacgtataattgcctgatgcgctacgcttatcaggcctacgtgtttttttgcaatgtattgaatttgcgatactttgtaggccggataaggcatttacgccgcatccggcaaaaatgagtcctcctcaaacgaggaggactatttacagatttcccattctcggcgggcaacgttccagcaactcgacgctgccgtcttcgttttgctgttccagcatcacatcaaatccccacaggcgatgcacatgcttcagcacttctttgcgcccccgatccagcggtgcgcgattatgtgggatgtaacgcagcgtcagcgaacggtcgccgcgcaaatccacgttccagatctgaatattcggctccagattacttaagttatattgcgacgataaccggttacggatttcccgataaccttcttcattatgaatagcggaaatctccagataattatgccgatcatcatccagcacggtgaagaagcggaaatcacgcatcactttcggtgacaggaactggctgataaaactctcatctttgaaatcacgcatcgcgaaatgcagcgtttccagccagtcggaaccggcgatatccgggaaccagtatttgtcttcttccgttggcgactgacaaatccgtttaatatcctggaacatggcaaacccgagggcatacgggttgatgccgctgtaccacgggctgttatagggcggctggaagaccacattggtgtggctgtgcaagaactccagcataaaacgttccgttactttcccttcatcatacagatggttaaggatggtgtagtgccagaaggtcgcccagccttcgttcatcacctgagtctgtttttgcggataaaaatactggctcaccttacgcacaatacgcaggatttcacgctgccatgattccagcagtggcgcatttttctccataaaatagagcaggttttcttgtggttcggacggatagcggcgcgcttcagcaaccgttttctcttcctcgcgcttcggcagggtacgccagagcatattgacctgactttgcagatactcttcgcgactcttctgccgggctttctcttcttgcagcgagattttttgcgggcgtttgtaccggtccacgccgtagttcatcagcgcgtggcacgagtccagaagccgttctacttcatcaacgccataacgttcttcgcactcggtaatatatttacgggcaaaaatcagataatcgacaatcgaactggcgtcggtccagctacggaataagtaattgtttttgaagaaagagttatgcccatagcaggcatgagccatcaccagcgcttgcatggtaatggtgttctcttccatcaggtaagcgatacacgggttagagttaatgacgatttcataggccagtccttgctgaccgtgcttatacagccgttcagtctcgataaactttttaccgaatgaccagtgcggatagttaattggcatgccgacgctggagtaggcatccatcatctgttctgaggttatcacttcaatctggtgcgggtaggtatccagccggtagagtttcgccacccggtctatctctgccagataaacatccagcaggtcgaacgtccagtcgggtccatcgctcaaacgtgtggtgtccttattcatagaatcgatcgtcgccatacgcgcacctcattgttgtcggcgctctctgtgtggagcacctcatttcaagcatagaacacctgttaaaaaccgcgtcgccggagaatttttttctttgcgatttcttattatcagagtgccactaatccgcttctgaacggaattttatgctggataaaaagggcgttcagcaggagatactaaagacgccatattgccgcagagtcagggagatgtgagccagctcaccataaaaaagccgtatgttgaataatattttcaactgagttatcaagatgtaattagattattattcttttactgtatctaccgttatcggagtggctatgcgagttgtcatactgggaagtggtgtggtaggcgttgccagcgcctggtacttaaatcaggcaggacatgaggtcaccgtcattgatcgggagccgggggccgccctggaaaccagtgccgcgaatgccgggcaaatctcccccggatatgctgcaccgtgggcggcaccaggtgtgcctttaaaagcgattaaatggatgttccagcgccatgcgccgctggcggttcgtctcgacggtacgcagttccagttgaaatggatgtggcaaatgttacgtaactgcgacaccagccactatatggaaaacaaagggcggatggtgcgtctggcggaatacagccgtgattgcctgaaagcattgcgcgccgaaaccaatattcagtatgaagggcgtcagggtgggacgctgcaactgttccgtactgaacaacagtatgaaaacgcgacccgcgatatcgccgtgctggaagatgctggcgtaccgtatcagctgctggaatccagccgcctggcggaagtggagcccgcgctggcagaagtggcgcacaaactgacgggcggcctgcaactgcccaatgatgaaaccggagactgccagctgtttacccagaatctggcgcggatggcggagcaggcgggggttaaattccgctttaatacgcccgttgaccaactgctttgcgacggcgagcaaatttacggcgtgaagtgtggtgatgaagtgattaaggccgatgcgtatgtgatggcgtttggttcttactcgacggcgatgctcaaaggcattgttgatattccggtgtatccgctgaaaggctactcgctgactattccgattgcgcaggaagatggtgcgccggtgtctactatccttgatgaaacctacaaaatcgccattacccgtttcgataaccgcattcgtgttggcggaatggcggaaattgttggctttaacaccgagctgttgcaaccgcgtcgtgaaacgctggagatggtggttcgcgatctctatccacgcggcggtcatgttgagcaggcgactttctggactggcctgcgcccgatgacgccagacggcacgccggttgtcgggcgtacacgctttaaaaatctgtggctgaataccggtcacggcacgctcggctggacgatggcttgcggttccggtcagttgttaagcgatctgctctcggggcgcacgccagcgatcccgtatgaagatctaagcgtagcgcgctacagccgtggatttacgccatcacgcccgggccatttacatggcgcacacagctaaggaaacgagatgacccgtccgatacaggccagcctcgatctgcaggcattaaaacagaatctgtccattgtccgccaggccgcgccgtacgcgcgcgtctggtcggtggtaaaagcgaacgcttacgggcacggtattgagcgtatctggagcgcgctcggggccaccgatggctttgcattgcttaatctggaagaggcaataacgttacgtgagcgcggctggaaaggaccgatcctgatgctggaaggatttttccatgctcaggatctggagatttatgaccagcaccgcctgaccacctgcgtacacagcaactggcagctcaaagcactgcaaaatgcgcggctaaaagcaccgttggatatttatcttaaagtgaacagtgggatgaatcggttgggcttccagcccgatcgcgtgcttaccgtctggcagcagttgcgggcgatggcgaatgttggcgaaatgaccctgatgtcgcattttgccgaagcggaacatcctgatggaatttccagcgcgatggcgcgtattgagcaggcggcggaagggctggagtgtcggcgttcgttggccaattcggcggcgactctgtggcaccaggaagcgcattttgactgggttcggcctggtattattttgtatggcgcttcgccgtccggtcagtggcgtgatatcgccaataccggattacgtccggtgatgacgctaagcagtgagattattggtgtccagacgctaaaagcgggcgagcgtgtgggctacggcggtcgctatactgcgcgcgatgaacagcgaatcggcattgtcgccgcaggatacgccgacggttatccgcgccacgcgcctaccggtacccctgttttagtggacggcgttctcaccatgacggtggggacagtctcgatggatatgctggcggtcgatttaacgccttgcccgcaagcgggtattggtacgccagttgagctgtggggcaaggagatcaaaattgatgatgtcgccgccgctgccggaacggtaggctatgagttgatgtgcgcgctggcgttacgcgtcccggttgtgacggtgtaacttgttatcgctggatgcgaccagcgtcgtatccagcgttataaaacacattaaacttaagattcggcttcttcctccgctacccgaacaccaatcttcaacacttcattatcttctttctcggccaccgtccagatcatcccggcaaactctacctggtcaccgacaaccggtgctgcgcctaacaactgctggacgatttcacccagcgtttgctgcttatcgcgatattctcgcccgtcttccagaccatatatcagcgccacatcagcatatttggcgctggcttcgagaatgaagtcaccaaagaagcgttgatccagcgcgaccggcggcgactggctgaacagtttaccgagcgccgggagatcgcgttcccgaccaattacacacaacacatcgccttcgcgcagtcgggtgctgccggtgggatgaagcaactggttatcacgaaacagtgccgcaatacgcgtctcttttggcatatgcaaatcacgcagtgccgcgcccacgcaccatttatcggcactcaattgataaacaaactgctcccacggattttccggatgaatatccaggccaacgcgtgacaccggacgtcccactggcggaacgaccactttggcttttttcgccgcccacgagagtgatgttccctgcaatagcagtgaaaccaggaccacaaagaaggcgacattaaagaacagtcgcgcattctccagccccgccatcatcgggaacacagccagaataatcggcaccgcgccgcgtaatcctacccagctgataaacacgcgctcacgcagattgaagccacggaacggtagcaatccggcaaataccgaaagaggacgggcgaagaaaatcatccatgcggacaaaatgagcgccggaatggcaatgggcagcagatcgcttgggttaaccaatagccccagcaccaggaacatggcgatttgcgccagccaggcgaggccgtcgaaattttgcaggatgccgtagcggttgcgaatcggccgattacccagcagaaaaccgcacagataaacagccagaataccgctgccttccagcgccgtggttaaagcaaaaattaaaataccgccgcttaatgccagcaatggatataatccggcgggcagggcgatgcgattaatcatttgcagcagtaaataaccaccgccaagcccgatgacaatcccgaggccaaattgctgcagaatatcgaccacgaacatccaactgacactgctttcatgttgctggatcatcgcaatcagggtaatcgtcagaaagaccgccattggatcattactgccggattcaatttccagcgtcgagccaacacgttcgttaagccccttaccacccagcagagaaaagaccgctgcagcatcggtggagccgacgatagcgccgattaataatccttcaatcaaatcaagattaaacagccacgccgccatcatgccggttaaaccagaggtgataagcacgcccagcgtcgccagcgacagtgccggtcctaacgccacacgaaaggagctggcctgagtacgcatcccgccgtcgagcaaaataatcgccagcgccaggttacttaccatgtaggcgaaggggtaattatcaaacgggataccgccgacgccatcaacccccgccagcatgccgatcgccagaaaaataaccagaatgggaatgccaagacgggaagaaaatgaactaagtaatatactgctggtgacaaggatggatcctaagatgaaaaggctaattattgttgtggcatccaacggtcggttactcctgattacgctgtctcttatataaaccctaccatattagcggcagagacagcgttttacttagccctgaagcgtgatttttttacattttaagaacaggatgaccgctaatcgtcaactgggtgccttcctgggtgttattaagaatggcatgtgcgcccaacggcagtgtaaccgtgcgttgttcatgaccaaaatcgaggccggtaatgagtggaatcgacaggcgggaacgcaaaaacgcgtacactgactccaggttgtaacctgcgtcataatcattaggcgtgctgccgctaaagctaccgagaataatcgccttctgacgtggcaaaattccagcatgatagagctgcaacagcatacgttcgacgcggaaagggtgctcgttaatatcttccagcaccagaataccgttctcaatttttggcatccacggtgtaccaatcagtgaaatcagcatcgcaagattgcctccccacagcgtgccttcggtctgacatgtcgggccttccccttgccattcaatggtgaacgttttattgcgtaacgccagccagaagtggtgctcggtaaaggcatttagttcatccgcgccaaagtttgctaccagcatggggccgctaaaggtgatgacattgccttgcgccagaagaccgcactgaatggcggtaaaatcgctatgtccgcaaatgagtaacgggtcatgttgttggcgagccaccagtgcctgccagtcaatatctgccagtaaacgactggcaccgtaaccgccgcgtacagacagcacgatggtgttgggggtagtcagtctggcaagagaattgagatcttccagacgctccgtttccgtacccgcaaaacgctcacaacgacgggcaataacctcgacgttattgacctgatgccccgcgtcggtaaggcgctggataccacgcagcgcggcgtgctgtttaatgcagtaacccgatggggcaattaagtgaaacagagacatggcaattccttgctgacaacagaaacgaaatgtatatcatgccgcttaggtgtgccgttgtcacctcaacggcgattccaggctataaggacagaagaagtgaaattgagatggtttgcctttttgattgtgttattagcgggttgttcatcaaagcatgactatacgaacccgccgtggaacgcgaaagttccggtgcaacgtgcgatgcagtggatgccaataagccagaaagccggtgcagcctggggcgtcgatccacaattgatcacggcgattatcgctatcgaatcgggtggtaatccgaacgcggtgagtaaatcgaatgccattggtttgatgcagataaaagcttcaacctccggacgtgatgtatatcgtcgtatgggctggagcggtgagccgacgaccagcgagctgaaaaatccggagcgtaatatttcaatgggggcggcttacctgaatattctggaaaccggcccgctggcaggcattgaagatccgaaggtactgcaatatgcgctggtggtgtcatacgctaacggggcaggtgcgctgctacggactttctcgtcagatcggaaaaaggcgatcagcaaaatcaacgatctggatgctgatgagttcctcgatcacgtagcgcgaaatcatcctgcgccgcaggctccgcgctatatctacaaacttgagcaggcactggacgcgatgtaaatcagtcgcgcacattgtccgcttttttccgggcttctcgctcgagagagaaaataatccgctgtaattgccgctccaccgtcgggctgacgttaagaaaacggaagctcagacggggagtggtgatggtttcatttttgccatcaatcactttgcgctcgctgatggagattaactgggcgtcaaagtgaaaaacaccccattgccccatgttgacttcaatctgagcgaagcgcatgccttcgtgtaattcggcaggctttgctgtttccagtaatgcgcccatgccgcctaacgacaaatcatacaggcggaaacgtaacgtactgttatccgccagtttggtctggcaaaaataaggcggatggagtggggcggtgatgcggaaatatcggcgtcgttgtacaaaccataaggtgggaggcggtacggtaataaatgccggaagcagcaagtattcactctgctgtagttgttcaacagtaaactcgactttcgcaccctgagtttcggcggtaatggtaatgtgctgcgcctttagcacggcgatgttgtcttcggcctggctgccgaaatccagcaccagtttatccggagttattgccagtattttgctgatcagctgcccgccattccagctgatacgcaaaggaattgcggctttgttcaaatcgcgtaacacgcccaggacggctaacggattttgtttcaggaactgctcatggtaatgactcacgcggaaaaactcctgactgacaaactgtctttggtttatcggtcgcagttaacaaaacttaatacaaatgcgcgaatattttttacatgttgttcttaaatcagccgacatacgcccagcatcgatcccgcccttgcctatacttagagcgttgacgtaagcatttcttgcgtccgattcatcgaaacgagggcctgaacatgggaattattgcctggattatttttggcctgatagccggtattatcgccaagctaatcatgccggggcgtgatggtggtggatttttcctgacctgtattcttgggatagtcggtgcggtggtcggcggctggctggcgaccatgtttggcattggcggctccatcagcggttttaatttgcacagcttcctggtggcggtggtgggcgctatcctggtgctgggcgtattccgcctcctgcgaagagaataagattttcataaggcggatagcgatacagatgccgctatccgctttcacatcagaacgtatactcgataccagcccagaaattgcgaccttcttcaataaacccttcactgtaggcatatttggtatcaaacaggttattgaccgacgcattaacgctgaagccatgacctaaggtgtaatcggctcgaatgtgggtcaccgcaaaaccggcggctttttgtgaaccgtcactgttgctgtagctggaggaacgcgcctcttccgacagcgttacgcttaacggctcccacggtttgagagtcatccatgcggtcattgtctgcgttggcagatcggttatcttgccgatgtctttgcgtttggcatcagcgtggatcagggcgtagctcaatcctacatccagtatattgctgattttccccttaataccggcatccagaccgctgtaatccaccgtgccgctgttctgattttgaatggtatcggcatcgatattgtgcgagaggatggcatcactcacccggttatagtaaacgctgacctcaaatccccagtcgtgcgtgaaggcaccattccaggttaaatccaccccgcgcgcgcgttccggcttgagctgcgggttaacaatcgctatctggttatacgcaggtttggacgtggtatagcgttctttcagcgtcggaaagcgtgtgcggtcatagtacgaaagcgccagcgtgtcttcattggcaaagtggtatttccccatcacctgccagttaaaagctgactgattgttgtcgtcataatgggtgatactgccatctttctcatgttttttcgcttctacgctatcgcgccagtcatagctgattccagccacgacatcgacattatcggcagcagcccattgatattcactggcgagcgaccaggtacgatcttcatagcgatcgtaagcggcgtgcggcgcacctttttcccggtgtacgtcatctttccagttaacggcaaacgacagcagatcgttttcacgcacatcggctgccagttgtaacccggcaccgtcgctgtaatcggaataatggctgtagctgccttttttatttttcaaatcagccagcgagttgtacatcattagcgtattttcaaaggtgtcgtgatacagccgacttttcagggtaaaacgatcgtttagttgggtcgttccctgataataaaaactttctttgtcatactctggccactgccagtagcgtgatttctgaccactatttccactgtatggcgggttatctttttcaccatcctgcttaatgtaagtcaatgtgtattcatcgttttcgcgtggtgtaaaaccgagcttcacaatgccgcgtttatcatcagccgatgaattaatcatcttgccgtgtttgcctgcaatatcattatttacaccatgcggcaggccgagaaaatcctgctttagctggctaccgctgacttgcaaataccccagatcgctgctggcggcaaatgaagcatgcatatcgtaggcattgtcctggctacggctccatccctgacgatatcccagactggcttccagcggtttagtcggcttctgggtggtgatattaatggctccgcccatctgattaggcccctgaagcagcgacgaataccctttggaaacttcaactgcccccaaattgttggtcagaatccgcgccagatcgaggttgccgtcatagggaacataaatgggcacaccgtcgaaatagaccggcacctgacgactatcaaagccacgaactttgacctgttcttcgttgcggctacctgacttttgcagcaccacgccggggacgacacttaatgcctgagcgacattctgtttatccagggccttcatggtgggttgatcgagaacggtggttgtcgtcgatgataccggactggaccatacggtcagcgtgtcactctcctgagccgctacggactgctgggtaaaggcaagtgataatactgtgcagagataacgttttttgagtctcatagaataaattccgtttaacaaagaattaaatagaggctgcgggttgcagactgactttaatgtcagcaggtgccgcgtaataaggcgcggaggtaataaaaaggcgaatgccgcagtcgaggtaatttttgagtgttgtcagattaattccgccggtcagagccagcgtgcagtggggagccagcgacggtgctatttgcgcaatttcagttgcctgttgcggactaaatttgtcgagctgaagtacgtctggttgcgcgcgtaacgcggcgattgcctctttcggcgtgtcggcttcaacaactattttcttctcgggtgcgtggcgacgtaactgattgattgcgcctgaccagtcctgattgtcatgaagaaaatggcggtggttggcaaacaataatatggtttccgcacatccggcacgatgaatcagtcctccggcagccagaattgcctgcgaggccagtaagcgggtgcccggaattgcttttcgggtgcaggcgatattgccatcagggtaacgttcacgaagtaacgccagcatttgagcgagataatcagaaacaccgcaactccactccagcacattctggactgccttccatccctgatgaagtgctgcggcattaccttgcgcacggattagccgctgacccgcgttcgcttgtgaaccgtcgctgaccgcgtcatcaatagttaatcccagcgtagttaacatcttacacgcgacagaaattccgctgacgcagccgccctgacggagaaaaaactctatatagccatgctggtgtccaatatttaatgctcgcgtggtcaggtcaccgccctggatatcttccagaagtaacgcatcgatttgtgcctgagaaaggaaaatcatcgcagtgtctcctgcggtacgctatcccaccagatgagcgcccagtcgcggctggcaggggcgagggcacgagcatcttgttgttgataccagcgatataaccgctcacgctcatcgtcgttaagcgcgcccagactccagctgacgttctgctcaaaacgttcccaggtgctgttatcctgttggcaattttgtccacggataaaatcaacgtgagcataaattcccatctgatacaggacgttgagcgcaaagatatagttgggtaattcgatcacttcccgaccagccgcccgctgaatggctggagagacgaacgaggtgctgaccagatgagtcgtatagacgcgaagccgtgcctgattattcagtttgctcattgcctggcgcatatcagccaccagagtggagcgggaagccacggcaatatcgcagcgtggcaggtcactccagtcctcttcccaggcgcgctggatccagtggacattgtctgcctttagcgcggcggcgcgacgggcggcaacgttcagcatcccctgactgtaatcaacgccataaatcgtcgtgagtttgtccgccagcgccagcgatacggtacccggtccgcagcccatatcgaataaggtttgcgcgccttgcaggtcaatttttgaggtcagttgttgcaggtagctgtccgtaggcgaggcgcaattttccgccattttttccgcccgttgatcccagtgatccggcgttttttctgtgcgatgggccagcctgagttgctgaaggtaaaggtctgcaaaatcaatatcgtcaatgagcatgatttttccttagtgcttaattgcagagaggtgatggtgaatctggtcggcagaaacccggtacagggcagccagttttttcgttgttaactgttcggtcggtaagccttgtgttactcgtccatctggctctacctggataatgctgtcggcaatggcgtttgcatggagcggatgatgagtcgacattaacattgtcatgccgttatttttgagctgcgccagcgtgtccagaagttggatctgatgaccgaaatcgaggctggaggcaggctcatccagtaataacaagcgcggttgctggacgagtgcacgggcgattaaagccagctgacgttcaccgccgctaagcgtattccagcgtcgtgtcgccagatgcaaaatgcccagcttttccagttgctccgttgctttcaggcgttcttgcttaccgggaacggaaaaagcgcctatggtgggggccaggcccatcaacaccatatccagcacactaaaagcaaaaatgccgtcgtgcgcctgcggcacccaggcaatagcctgcgcgcgctggcgatggctgagtgtctgcacagggaggctatccagtaagatctcgccttttaataacggtataacgccaagaatggagcgcatgagtgtggttttgccgcaaccattggctcctaacagacaacaaattgttccttgcgacagggtgaaggacacgtcgcgtagcaccggatggcgggagtaacccagagacgcatgacggacggcaagcaaagtcactggcgacctccgcgtaacaacaaaaacaggaaaaacggtgcgccaacaaaagcggtcagaatgccaagtgggatttctgttgttccaatgctgcgtgccagcgtatcggtaagcaggagcagaatcgcgccagtacacattgccatgggcaacagctgctgatggttatgaccggtcaacaagcgggcaatgtgcggaacgaccaggccgacccaaccaattatgcctgctattgctaccgtgctggcggtgatgagtgtggcgcagacaatcaatccaaagcgcagacgtgtcacgttcagtcccagcgaacgggcttcgtcgtcggaaagtgtgagtaaattcatgcgccagcggagaaaaaacaggggcaaggagcctatgagaatgatcggtgcagcatagcagagatcgcgtaaggtcacggtggacagcccccccagcaaccagaaggtaattgacggtaactgggtgtaaggatcggccagcgtttttattagcgatatccccgctccgcacaacgtgcctaatgcaatacctaccagcaccagggttaagatcggagcgtggcgggtcacccgacgcgtaatcaaccagacgcccgcgaccaccatcagcccgccgcaaaatgcgtacagctggatgtaaacaatggataatccgcacaggattgccgcgcaggcaccaagtccggcaccggcggagacgcctaaaatatccggtgacactaagggattacggaacattccctgataggtggttccggcccctgccagcgccgcgcccagaaacagcgcagcaagaatacgcggcacgcggatttgccagaagacaatttgttcttgcacaggaacattttcttgacgaagaatgagcgccagcagttgctgcatatcgagatgataagccccacttacggcggcaaaagtgatactgatagctgccagcagcaaaatacatccgtttacggttctcattagctcgccaccaatttttgatagtcggcgtcactgagtgaacaatgccagaacagttgggcgtaatgctgcatgtcacttttaaactggcgattgatggcgggatccagccaggcgtgaagtctgcgtaatcccagaagacggttgattcccggcggggcatccagccagccaaagggcaggccacttaaaaataagatgcgttgttccgcaaccgctttcacgccctgccagagaggatcacgacgaataaaatctgcagtaacggcctcctgaaccagaataatatccggctgccagcgcaggagattttccatggaaacctgtgtcagaccgtggcgatcggctatttgcgcgacgttatgcaaacctaataattccgccgcctcggtatgcaacgaaccctgtaagcccgtttccagccctcgaggaccgcgcgcagcataaaagctgaggttagcggcgggtgaggtggcgaatgcctgagcttcaccaacgaagcggctggcgagattggcttgttctgcggcgcggtgctcttcgcctaacgttttgccaagcgttgttaactgttctgctgattgttccagtttcccgttaagcaataaccagggtatttgtgtctgttcgctaacctgccgtgcctgggagatccaggtttcatccgtattgccgcaatcaacgaccaaatcgggatgtaacgccataagcccttccagcgagagtgtgctggcgcgcccggcgagtcgtcccagcctggggaactggcgaatgtgctctggcaatggaattaatgcctgacgggcaaaatcaaaagaggaaaaaccgaccattttttctggcgcgacagccagcaatagtaaatcggcgggcgcgcctgcgctgacgatgcgtgtaatgttttgggcttcgggaagcgtcagtgaggcccagaatttgactgattgtgcaaaggacggcagatgatgcaggaacaatgtcgacgcaagaatctgtgtaaacctccgtctggttagtgacataagttatatcctgataataaaaaccgctatatatttacatatatatcgaaaaaaatcatgtttgatgtcaaaatttgtctaaagagacagaatgatttgcttgttgcttaaataacactttgttccacaagaaaattgtcagggagaatggcggagtggcgaaaaatataaatagaggtgtaatgattaacaaattgataaaataaaattaaaatcttctctgataaaagaaaataaaggcatagaccgtagaatggggggcatttcgtggcgaaaaaagagcaatgccaattttatgcacataatggcattgctcgatatacagcaaagttaaggcgtaggttccgcctctttttgttttaccggctgtgttgttgactcactgagtggacgcgtcgccggaacattgtcacacggttgctctttcgggcagatcaaatccagcattttcagcgtcacgccattggtccagccaaagccatcctgtaatggatattcgccaccgccgccccctgttccggtggcgctgacatcatatttttccaccagctttttctcccggtcataggtgtgctgaacattggtcaggaagtgccagctaatgtccatcgccacctctttttgcccgtagttttgtaatccttctgtcgcgacccactgcaacggtgcccagccgtttggcgcatcccattgttgtccacttttcaccgacgtggtgttcaggccgccgggttgcagcagatgtgttttcgtcgccgtcgccattttgctggcgcgatctttcgctgccgcattgacgtacagcgggaacagggcggccgcggttaactgattgcgcactttatgacttttcaggtcgtaatcggcataccagccttgttgatcgttccacaggtatttttcgatccctttttgacgggcattcgccagcgtttcgtactggtttgccatcgcgttatctccggcagctttgctggcgcgggcgaggattttttccattttaaacatcaggctgttcagatcgaccggtacgatgctggtggtgcgtaaggtatttaactgctgcggattgtccatccagcgtgagctgaaatcccagccagacgcagcggcagagcgcaggtcgcggtaaatttcagtggcaggtcgattcggattgcttttggcagtggcaatatcttccacccatgactctggtcgtggcgtatcgcgatcgtcccagtagcggttgagaagggtaccatcctgaagttttacaacgcgtttttcctgttgtccggcttgcaggttttcaacaccgtccatccagtaagcatattctttttgcatttgcggcaggtattgtttcaacgcggcgtcgccttcatgctgcgccagtaactctaccatcagggcaaagaagggcggctgcgagcggcttaaatagtaactgcggttgccgttgggaatatgaccgtaagtgtctatttcatgagcaaaattggctaccatatccgcgactttatcccagtgaccgctttcggcaagtcctaacatggtgaagtaactgtcccagtaatatacctcgcgaaaacgtccgccgggcacgacataaggttttggcagcggtaatagagaatcccatttttcggtgttttcggtagaacgcgttaataccggccaaagtccgtcaatatgttcgcgcagtgattgcccctctggcggaacatatttctcgccctctttcggcagggtgaaattgacgttaacgaaatggcgtagatcaaatccgctctggttttgctgcatccgataatcagcaaggatcatcagcggatcgctgttcggcacggcatcggcaaaggttttttggtccggaaaaagtttggcgttttgcacatcattaaacagcggccctaataaaatatcaggcggttgtggtgttaccgatgtttcttctgcctgcaccgatagcgcagcgaaacacaaaaagatgcaggctggaattaacgccattttttgcgggcgagaaggtgcgggggatttcatcagtcattctcctttggcgaaaccgaataaaacggtattcaagtatcagaaaaccttagttcaggatcgcactagctgcatgatcgaaatcacattctgcgaactgacagacattttagaaaagggaattaaagagataaataacggcgaaatagagtgataaaataacatctgtttattagtcagccagcgacgttgggtttgcgattagcgaagaaaaatcatcataatttggtgaaaaatataacaggtagttaaaaacatcagtgcagagtaaattgccggatgacatcagaatgatgccatccgaacggtggtttaaccctgatggttgaaacgttgcgttttaacgtccagcgttagcgtttcttctggttgtatcgcatacagtttctcaccctgctggcaaatccagccaattcccagttcacgggcgattagggcactgtgggatagcggacttccggcgctaaggcagataccttttacaaccgctggatccagttgcagtactgtggagggataaatgttctccgccagtagaatagttggcgagttaaactgcgggagttcttctttcgtttgggtcaggtggaccagggtgcgatgcagaagatcgtccacatcgatatagcgagcctgtagatattcatcatccagctgttggtattgctggctaagttctttaagaacttgctgccaggcatattccgccgtgcaatgttcatgctgaaggagttcgcttgccgccgcctgcagttccggatcatctaacagtgtatggtgaccagaaaagattgcggcaatatcgtcaagcccactggtttctgctttcgctgttaacgtcatcagatctaataacgtgaagtcaatggcctggcgtaatcgttcttgttcttcttccacggtcagggttgattttgcctgtaccgtacataaaacaggttgataataaaaggctttacccgaaacaggcggaacgggacgcagagtaggtggagcaacttcctccgtttcaccaaagttatcttcagccagctgacggaaagcgatcagtgcctcttcagcttctggtcctttcgcaatcaggcgcagcgtatcgttatagcgaacttgtagtaacgcaatctggttaatactctccggtgtaacgcatttgccgtttttctccagcaacatatcggcattaaatgtcgataaggtataaaccagccgggaggccggacgtacatgcaggccgttacggttttttatgaccaccgacagagaacgggcttcttcatcgtacggaggacatgtgccagagatttcagtgtcagaggacggtaaacccagttgttcacgtttggcttccagcgcatgcatggcgtcaaagataactttgtcgatatccgcccccgaggccgcgctgaccgttgctgccagtgtaccttcgaccaacggcgcagcacacaaacgtacttttgcggcgatctcgggagccagcaattccagcgcagtttcagcactcaataatgcgctacccatatccatcatgaccagcacatggtcggcatcggcaacagattcgatggcctccatcactttgacggcatcggtaccaatgggattttgtggatcgtcaattcccgcggcaatggcgattttacaattatcactcattaacatctgacgggctaattcaccgacaccttctcccagtcggctgctatgtgaaactatgaccaggtttaccatcaccaattccttactcttttgcggctaacgccaacatttgcatcataaacatcaccgaggtcgcgccgggatcctggtgaccaatactgcgttcaccgagataactggcgcggcctttgcgggcttgcatcgtaatcgtactttgtgcagcggattcggcgatgctactggcagcgtcgagcgccgccggaacagggagattttgctcgcaggactgacgtaacgattccaccaccggcacccacacatcacacatggttttatcgccaggttcggctttcccgcgactgattacgccgtccgcgccatcgcggaacatctgataaagctcttccagcgtcaggctttgccgtgcctgggttgtctgtgcggcgcggataaagaaggtaccgaacagcggaccactggcacctccgacgctggaaagtagcgtcatgccggtattcttgagaatgaaaccgatatctttatctgcgatagcagggagtttttccaccactttgctaaagcctcgattcatatttagcccgtggtcagcgtcgccaatctcgcgatccagtccagtaagatactcgctctcggtgctgaaaatatcgccacaacgagtgagccagttaacaatttgagttctgctcagtgacattgctttctccttatttaccccagttaagggccggggtgtggacaggggcgtcccagagtgccagcgtttcgtcatcaactttcagtaaggtgattgagaaaccggtcatatccagtgaggtgcagtacgcgccaattaaattacgttcgatagtcaatcccgcttgctggcaacgtgtggtcaggcggttatagacgccgtacagctcagaaagcggagttgcgccaagattgttaaccagcgcaatcacccgatcgccagactggagcggttgtttggtttgtggttcttcctgccagctgccttgttgataatcccagaaacgcaaagtgcgatggtatgagccattttccagcagggtgtcgaacatttcatcgacggtttgatcaagggaagagaaggggcggcggtcaatacctggctcaccatgaatgccgacgccaaactccatctcattatccgccagggtaaaagaaggtttgcccgcggcaggaacggtacaggcaccgagagcgatacctattgaatggccttgattattcaacttacgccccagttccgcacaggcgtccagtgagtcgccacgctccgccgctgcacctacgagtttttcaattaatacggtgttggcaacgccgcgccgcccggcggtataaagactgtcttttactgcaacgtcgtcatcaatgaccacagtggtcacttttacgccgctatcgtgcagtaactcggttgctgtttcgaagttaagaatatcgccggtgtaatttttgataatcaacagtacaccttcgccgccatcaatttgcatggcgcattcaaagattttatcgggcgtcggtgaggtgaaaatttcgcccggacaggccccagaaagcatcccctgaccgatataaccacaatgcatcggctcgtgtccgctgccgccacccgacagcagggcgacttttcctgcaacgggggcatcagctcgggtgacatacaccggatcctgatgcagtgtcagcgatggatgcgccttcgctagtcctgccagttgttcgtccagtacgtcttgcacatcattgatcaattttttcattattttgctccagcaattacggtagggcatggatgatgttcaacgacacggcgaccactgactgccgatgaatccattgtgcatcaggcaagggaaaagaaaattagcccaaattaggtttcatagtgaaacatatgctttaatgaatgttccatattgaaacttttacgtgtattaatacttaaaattgcgagccggaacaccttttgtcataagggatgcgggatatgagtggcgcttttaacaacgatggtcggggcatatctcccttaattgcaacctcctgggagagatgcaataagctgatgaaacgggagacatggaacgtaccacaccaggcccagggcgtgacatttgcttctatttatcggcgtaagaaagcgatgctgacgctcgggcaggctgcgctggaagatgcctgggaatatatggcaccgcgagagtgtgcgttgcttatcctcgatgaaaccgcctgcattctcagccgtaatggcgatccgcaaaccttgcagcagctaagtgtactgggattcaatgacggcacgtattgcgccgagggaattattggtacttgtgcgctatcgttagcggctatctctggtcaggccgtgaaaacgatggccgatcaacatttcaaacaggcactctggaactgggccttttgcgcaacgccgttgtttgacagcaagggccgattgacgggaacaatagcgctggcgtgtccggttgagcaaactaccgcagctgatttgccgttgacgttggcaatcgcacgcgaggtcggaaatttactgctgacggacagtttgctcgctgaaactaaccgtcatttaaatcaacttaatgccctgttagaaagtatggatgatggcgtgattagctgggacgagcagggtaatttgcaatttatcaatgcccaggcggcgcgggtcttgcgccttgacgcgacggcaagtcagggacgagcaatcactgaactcttaacgttacccgccgtattgcaacaagcaataaaacagtcacatccgctcaaacacgtagaagccacctttgaaagtcagcatcagtttattgatgcggtgataacccttaaaccgataatagaaacgcagggaaccagctttattttattgctccatcctgtggaacagatgcggcagttaatgaccagtcaattaggaaaagtcagccataccttcgctcatatgccacaggacgatccgcaaacccgccgcttgattcattttggtcgccaggcggcacgcagtagctttcctgtcctgctttgtggagaagagggcgtgggcaaggcactgctaagtcaggcaattcataatgaaagcgagcgtgcagcggggccttatatcgccgtcaattgtgagttatatggtgatgcggcgctggcggaagaatttattggtggcgatcgcacggatagtgaaaatggccgtctgagtcggctggaactggcgcacggcggcacgctgtttcttgaaaagattgaatatctggcggtggagttacagtctgccttgcttcaggttatcaagcagggggttatcacgcgactggatgcgcggcgtttaatacccattgatgtcaaagtgattgccacaacgaccgcggacctcgcaatgctggtggaacaaaatcgttttagtcgccagctgtattacgcgctgcatgcatttgaaattaccatcccgccactgcgtatgcggcgtggcagcattccggcgctggtgaataacaaattacgcagccttgaaaaacgcttctctacgcggctgaaaattgatgacgatgccctcgctcgcctggtttcctgtgcatggcctggcaacgattttgaactttacagcgtcatcgagaatcttgctctgagtagtgataatgggcgcattcgcgtcagtgatttgccggaacatctgtttaccgagcaggcgacagatgatgtcagcgccacccgcctttccaccagtctgtcatttgcggaagttgaaaaagaggcaattattaacgcagcccaggtcacaggcggtcgcattcaggaaatgtcggctttacttgggatcggccgcactacgctgtggcggaaaatgaagcaacatggcattgatgcagggcagtttaagcgccgtggatagcgggagagtatgtactttcccgctatgaattgctaattaatagcgaccatgactgccgtgatttggtccaccatttgaaggtggcattggcttacctgagggcgcaggaccacgagggccatcgctgtggcggtgatgatggtggggaacacaagcactcaacaggcttgcaaagacaattgctaacaggctgaaggtaaatgtttttttcatgacaaactcttgaacggttaatgcactgtgattgttatcacataaaagctgcattgttaatattgtcaggagtctgattatgagttttggtaactcagaattgaaagaagacgcgtagcaggcgtaaaaaagccattacgtgcaactcacataatggctcgttattaaccgctagggtagtattagcggaattagacgttgaacaggaagttcatcacatcgccatctttaacgatgtaatctttgccttctgcacgcattttgcctgcttctttcgcgccttgttcacctttgtaagtgatgaaatcttcaaacgagatggtttgtgcacggataaagcctttttcaaaatcagtatggattttgcccgctgcctgcggcgcggttgcaccaaccggaatggtccatgcacgcacttctttcaccccagcggtgaagtaagtttgcaggttcagcagcttataaccggcacggatcacacggttcaggcccggctcttccagcccaagctcctgcataaactcgtcacgctcttcgtcgtccagttcggcaatgtctgcttcaacagcagcacaaaccggaactacaacagaaccttctttcgctgcgatttcacgcacctggtcaagatacgggttgttttcaaaaccgtcttcgttgacgttggcgatgtacattgttggttttagcgtcaggaagctcaggtaacgaacagccgctttctcttcagcgcttaaatccagcgcacgcagcatacctgcgttttccagctggggcaggcatttttccagtaccgccagctcggctttcgcgtctttatcgccacctttggctttcttctgtacgcgatgaatcgcacgttcacaggtgtcgagatccgccagcgccagttcggtgttgataacttcaatatcatccgccgggttaactttgccggaaacgtgaatgatgttgtcattttcaaagcagcgaacaacgtgaccgatcgcttcggtttcacggatgttggtcaggaactggttacccagaccttcgcctttcgatgcgccttttaccagaccggcgatatcgacaaattccatggtcgtgggaagtgtacgctgcggttttacgatttcagccagttgatccaggcgagggtcaggcattggtacgacgcccgtgttcggctcgatggtgcagaatggaaagttggccgcttcaataccggctttggtcagcgcgttgaacagggtagatttcccgacgttgggcaaaccgacgataccgcatttgaatcccatgatttaaatcaccttaatatcttaataatcaacctgttattgctaacagattgcagaaatggaaataactttgcctattatacacggcactcggcaaaaatgccgcagacaacgacttattgcgctttaaaggcgtgcaatcggttcgttgctttggtcaagccatctgtaaaccacatttcagtacaacgcgccgcttcgtcgatggcttcatcaattaacttctgttcactaacaggcggtttgcctaacacaaaaccgacaactttatttttatcgcccggatgaccgattccgatgcgtaaacggtgaaagttagggttattacccaatttactgatgatgtctttcagtccattgtgaccaccatgaccgccacccaacttaaatttggcgacgccaggaggcagatccagttcgtcgtgggccaccagaatttcgtccggattaatgcggaaaaaactggccatcgccgcaacggctttgccgctgagattcataaatgtagtcgggactaacaggcggacatcttcgcctccaagggtgactcgcgaagtataaccaaagaatttagcctcttcgcgcagcggagcgcgcaatcgctctgccagtaagtcaacgaaccaggcaccagcattatgtcgcgttgcggcgtattcagcaccggggttcgccaggccgacaatcaatttaatcgtcacgtttttttgtcctgagtgtgtacataactggcgcgtagtttactggttgcggccccgcttgacaaaaaactgcgtatcaaatgcagataatgcaattattgcctgagtggactattagaaagtcaaggtgttcaggcgtttatttgtaaagttttgttgaaataagggttgtaattgtgatcacacccgcacataacctacagggtgttgtctatactttacacataaggaagaggggtattccctgttacaacccagaaagttccggaggtgacatatgaaacgcaaaaacgcttcgttactcggtaacgtgctcatggggttgggtctggtggtaatggtggtcggcgtggggtattcaatcctcaaccagttaccacagtttaatatgccccagtatttcgcacatggtgctgtgctaagtattttcgtcggtgcgattctctggctggcgggtgcccgtgttggcgggcatgaacaggtgtgcgaccgttactggtgggttcgccactatgacaaacgttgccgccgtagcgacaatcgccgtcatagctaacaaataatgcagtttgctgaccagtcagtttgcgctgactggtcaatctcgtacttataaatccgccatcgccgcgcgacgattcgggaagaatgcgaggcgtcccgggatcggttgaatgcctgcgcgagccatagtgcgcagtggctggaattccaggttgcacacgcgcagttcacatccttcgggcagacgcttcacaaaacgctggaacgcatcaagaccaccagcatcaagtaccggaacggcatcccacttcagaatcacaatccgtttgccttcaagacgtgactccaggtccgtgaataagccttcagcggcagcaaaaaacagcgggccaataacgcgcagaaccaggacatcgtctggaacgtctacgactaccggtgccaggcgagtcatacgtgcgatacgacgcataaacagcagcgatgccagcacgatccccacgctgatggcaataaccatatcgaacagcacggtcagcgacatgcacagcagcatgacgatgatgtcatctttcggtgcatgacgcagcaagtcgaccactttgtgcgcttcactcatgttccacgccaccatcaacagcagggctgccatggcggaaagcggcagccaggagagcagcggtgccagtaccagcagggcaagaataaccagaatagagtggatcaccgccgagataggggaagttgccccggcacggacgttagcggcagaacgcgcgatggcagctgtagcggtaataccaccaaagaacggagcgataatattccccaatccctgtccaaccagttcgctgttcgccttgtgttttgtcccggtcataccatccagcaccacggcgcagagcagagattcgattgcgccgagcattgccattgagaatgccgcaggcagcagtgtgcgaatagaatcccaggttagcgtgaattctgaattaggcagatcccacggcagcaccagttgcggcagcagttgcggaataccgttaccctgagaaccatcggccaggacgtagtggaattgcgaaccgatggtagcaacatgtccgccgagcaggttaacaatccccatcaccgcgcaaccagccagcaaggccggaaggtggccgggtaaacgtatgcccagacgcggccagaaaaccagaatgccaagcgtcacaatgccaatggctgcatcacccacattaatggtcggcagcgccataaataatgcgccgactttttgtagataatgttccgggacatgggccatttgcagaccgagaaaatctttaatctgcatggtaccgatggtgatcccgatacccgaggtgaaacctaaggtgacggaaaccggaatatactcaatcaggcgaccaaagcgtgccagccccatcagaatcaaaaagattcccgacagcaaggtcgcaaccagcagtcctgccagtccaaactgttgcgaaacgggatagagaattaccacaaatgccgcagtcggaccggaaacgctaaagcgtgacccccccgtcagagcaatgacaatccccgcaacagctgcggtatataaaccgtactggggggccacaccactaccaatagccaacgccatcgccagcgggatagcaataatcccgacggttatcccggcaatcaggtcacgggtaaaccgtgcggcagtatatttttctttccagcaagcgtcgatcagagcgcggaaaggcatcacatgtgaggaaaatattttgttcacaataatgtttcatccgtgagcgcatcatctgtcaactaaatggcaggtgaaggaggcataggtcatacaaatggatattacagacaaaaaaacccgccgcagcgggtctttgagccgggttcgattagtgttcgaacatggcagagatcgattcttcgttgctgatacgacgaatcgcttcggccagcatacctgacagggtcagagtacgcacgttcggcagtgatttgatttcatcgctcagcggaatggtatcgcagacaacgacttcatcaattacagagttacgcaggttgttcgccgcgttgccagagaagatcgggtgagtcgcgtacgcaaatacacgtttagcaccacgttctttcagagcttcagcagctttacacagcgtaccgccagtgtcgatcatatcatcgaccagtacgcagtcacgacctgcaacgtcaccgatgatatgcatcacctgggaaacgttcgcacgcggacgacgtttgtcgatgattgccatatcggtatcgttcagcagcttagcgatagcgcgggcacgcacaacgccgccgatgtccggagaaaccacaattgggttatccagattcagctgcagcatgtcttccagcaggatcgggctaccaaatacgttatcaaccggaacgtcgaagaaaccctgaatctgttcagcgtgcagatccactgtcagcacacggtcaacaccgacgctggagaggaagtctgcaaccactttcgcagtgattggtacacgagcggaacggacgcgacggtcctggcgcgcatagccaaagtaggggataacagcggtgatacgacctgcggaagcacgacgcagggcatcaaccataacgactaattccatcaggttgtcgttagtaggggcacaagtggactggatgatgaaaatatcaccaccgcgtacattttcattaatttgtacactgacttcgccgtcgctaaagcgacctacagcggcgtcgccgagtgaagtgtacaggcggttggcaatacgttgtgctagttccggggtggcgttaccagcaaaaagcttcatatcaggcacgagaagaacctcaggcatgcgtccattggtggaaagaatctgccgaaaactgtgcgggccaggcatgattctttccaggcggtgtattaaagagcgcgatgcaacgtctggaacaaggtgacgttgtcaccgaaactcagcttgcccggcttaaagcatggctctgtgcaatggggaaagattaacgcctttcgccacaaagccattgagccattccggggcttgctctagcacctggcgggcttcagactctgtatcaaattcagcaaagacacaggcccctgtcccagtcaggcgcgacggggcgtattctaacagccaggaaagcaccgcatcaacctcgcgaaaacgttttcttgcgataacctcgcaatcattgctgaattcacattttagcaacgtttctattgacctttttggcgtattgcgcgggagttcaggatctttaaaaatcaccggtgttggaatacttacaccagggtgcgccaccagataccacttctctggcggatccaccggcattagtatttcaccaacgccttcggcaaacgcggcatgaccacgaacaaagacaggaacatctgcgcccagcgtcagccccatttccgccagctcatccatgcttagcccgcattgccagagatgatttaacgccaccagaaccgtcgcggcattggatgaaccaccgccgagaccgccgcccatcggcaaacgcttgtcaatgctgatattcgcaccgcttcccgtcgaaagacgcccgctgtctgccgcagttttcatcaacaacctcgctgcgcgaacgatcaggttatcttcatgttccacgccttcaacgggcgttaacagacgaatatccccatcgtcacgaagctcaatgctgatggtgtcgccgtaatcaagaaactgaaacagcgtttgcagcgtgtggtaaccatccgcacgctgaccggtaatgtataaaaacagattaagttttgccggagagggccactgtgtccgcattatttcactatccagttatccatttttaacttgatgcgttgaccaccgtcggtgagttccatattggctggcatcgcaggttgagtttttgtgtcataaccaccgtaaacaactttccagtttttgccattctggctgtaggtgatttcactcaggcggtactggtcgtcaagtttgtagtcagtcgcatcacccggtaaacctaaaatccactggcgcaagctgttgagcggaattggcattccggtcaatttgccaatcatctcttcggcgtcatcggaggtataacgctgacctttattgtcgactaactgcacgttacccggttgagcattcagctccagttccgtgctgcccaatgggttagtcagcagcagacggtagcgatcctggccagtttgctgccagaagaaacgggcgtacactttttgttggtcagaaatataagcgaacgcgccgcgagtttgatactgattaagattgcgcacgtcttgctgatgctgacgccattgtggcgaatccgggcttttgcctgggcctttgggtgtggtaatagaacaggcagtgagcacgagggctgctagcggtagcaggcggataaagcgaaaatcgggcaggggcataataatgacaagtccttgagatacattgcagttataacccttaatgctagcgttaccgttagccatcgtctatgttcacgttgtcttaattgccagaatctaacggctttcggcaattactccaaaagggggcgctctcttttattgatcttacgcatcctgtatgatgcaagcagactaaccctatcaacgttggtattatttcccgcagacatgacccttttagcactcggtatcaaccataaaacggcacctgtatcgctgcgagaacgtgtatcgttttcgccggataagctcgatcaggcgcttgacagcctgcttgcgcagccgatggtgcagggcggtgtggtgctgtcgacgtgtaaccgcacagaactttatctcagcgttgaagaacgggatgacctgcaagaggcgctcattcgctggttgtgtgattaccataatctcaacgaagacgatctgcgtaatagcctctactggcatcaggataacgatgcggtcagtcatttaatgcgcgttgccagtgggcttgattctctcgtccttggcgagccgcagatcctcggtcaggttaaaaaagcgtttgccgattcgcaaaaaggtcatatgaaggccagcgaactggaacgcatgttccagaaatctttctctgtcgcgaaacgcgttcgcactgaaacagatatcggtgccagtgctgtgtctgtcgcttttgcggcttgtacgctggcgcggcagatctttgaatcgctctctacggtgacggtactgctggttggcgcgggcgaaaccatcgagctggtggcgcgtcatctgcgcgaacacaaagtacagaagatgattatcgccaatcgcactcgcgaacgtgcccaaattctggcagatgaggttggcgcggaagtgattgccctgagcgatatcgacgaacgtctgcgcgaagccgatatcatcatcagttccaccgccagcccgttgccgattatcggtaaaggcatggtggagcgcgcattaaaaagccgtcgcaatcaaccaatgctgctggtggatattgccgttccgcgcgatgttgagccggaagttggtaaactggcgaatgcttatctttatagcgttgacgatctgcaaagcattatttcgcacaacctggcgcaacggaaagctgctgctgtggaggcggaaactatcgtcgcccaggaggccagtgaatttatggcatggcttcgagcacaaagcgccagcgaaactattcgcgattatcgtagccaggcagagcaggttcgtgatgagttaactgctaaagcgttagcggcccttgaacagggcggtgatgcgcaaaccattatgcaggatctggcatggaaactgactaaccgcctgatccatgcaccaacaaaatcacttcaacaggctgcccgtgacggggataacgaacgcctgaatattctgcgcgacagcctcgggctggagtagcagtacatcattttctttttttacagggtgcatttacgcctatgaagccttctatcgttgccaaactggaagccctgcatgaacgccatgaagaagttcaggcgctgctgggtgatgcgcaaaccatcgctgaccaggaacgttttcgcgcattatctcgtgaatatgcgcagttaagtgatgtttcgcgctgttttaccgactggcaacaggttcaggaagatatcgaaaccgcacagatgatgctcgacgatcctgaaatgcgtgagatggcgcaggatgaactgcgcgaagctaaagaaaaaagcgagcaactggaacagcaattacaggttctattactaccaaaagatcctgatgacgaacgtaacgccttcctcgaagtccgtgccggaaccggcggcgacgaagcggcgctgttcgctggcgatctgttccgtatgtacagccgttacgccgaagcccgccgctggcgtgtagaaatcatgagcgccagcgagggtgaacatggtggttataaagagatcatcgccaaaattagcggtgacggtgtatatggtcgtttgaaattcgaatctggcggtcatcgcgtgcagcgtgttcctgctacggaatcgcagggtcgtattcatacttctgcttgtaccgttgcggtaatgccagaactgcctgatgcagaactgccggacatcaacccagcagatttgcgcattgatactttccgctcgtcaggggcgggtggtcagcacgttaacaccaccgattcggcaattcgtattactcacttgccgaccgggattgttgttgaatgtcaggacgaacgttcacaacataaaaacaaagctaaagcactttctgtactcggtgctcgcatccacgctgctgaaatggcaaaacggcaacaggccgaagcgtctacccgtcgtaacctgctggggagtggcgatcgcagcgaccgtaaccgtacttacaacttcccgcaggggcgcgttaccgatcaccgcatcaacctgacgctctaccgcctggatgaagtgatggaaggtaagctggatatgctgattgaaccgattatccaggaacatcaggccgaccaactggcggcgttgtccgagcaggaataatggaatatcaacactggttacgtgaagcaataagccaacttcaggcgagcgaaagcccgcggcgtgatgctgaaatcctgctggagcatgttaccggcagagggcgtacttttattctcgcctttggtgaaacgcagctgactgacgaacaatgtcagcaacttgatgcgctactgacgcgtcgtcgcgatggtgaacccattgctcatttaaccggggtgcgagaattctggtcgttgccgttatttgtttcgccagcgaccttaattccgcgcccggatacggagtgtctggtggagcaggcactggcgcggttgcctgaacaaccttgccgtattctcgatctcgggacgggtaccggggcgattgcgctggcgctggccagcgagcgtccggactgcgaaattaccgctgtagatcgtatgccagatgctgtctctctggcgcaacgtaatgcccagcatctggctatcaaaaatatccacattctgcaaagcgactggtttagcgcgctagccgggcagcagtttgcgatgattgtcagcaatccgccgtatattgacgagcaggacccacatcttcaacaaggcgatgtccgctttgagccgctcactgcgctggttgcggcagacagtggaatggcagacatcgtgcatatcatcgaacagtcgcgtaacgcgctggtatccggcggctttctgcttctggagcatggctggcagcagggtgaagcggtgcgacaggcatttatcttcgcggggtatcatgacgtcgaaacctgccgtgactatggggataacgagcgcgtaacgctcggccgctattatcaatgacaagtttttctacgttgcttagcgttcatctcattagtatcgcgctttctgttgggctattgaccttacgtttctggctacgttatcagaagcatccacaggcatttgctcgctggacgcgcattgtgccgccggttgtcgatacgctgttattgttaagcggcattgcgttgatggctaaagcgcacatccagccattttccgggcaggcacagtggctgactgaaaagctgtttggagttatcatttatatcgttttgggttttattgcactcgattatcgtcgtatgcacagtcagcaggcgcgcattattgccttcccgctggcgttggtggtgctgtacatcatcattaaactcgccaccacaaaagtaccgttactggggtaagtcatgagatcgttagctgatttcgaatttaataaagcgccattgtgcgaaggcatgatcctggcttgcgaagcaatccgccgcgattttccctcgcaagatgtttacgacgaactggagcgtctcgttagtctggcgaaggaagaaattagccagcttctgccattagaagagcagctagaaaaattaatcgcgctgttttacggcgaatgggggtttaaagcctcacgcggcgtttatcgtctttccgatgcattatggctggaccaggtgttaaagaatcgacagggcagtgcggtatcattaggtgcggttttattatgggtcgcgaatcgtctcgatttgccgctgctgccggtgattttccctacgcagctgatattgcgcattgaatgtccggatggcgaaatttggctgattaatccttttaacggtgaatcgttaagcgaacatatgctggatgtgtggttaaagggaaatatcagcccgtcggcggaactgttttatgaagaccttgatgaagctgataacattgaggtaatccgcaaattgctggatacactcaaagcttcgttgatagaagaaaatcagatggagctggcgttacgcaccagcgaagctttattacaattcaacccggaagatccctatgaaattcgcgatcgcgggttgatttatgcgcaactggattgcgaacacgttgcgttgaacgatttaagttatttcgttgaacagtgtccggaagacccgatcagcgaaatgatccgtgcgcaaataaataacatcgcgcataaacatattgtgctgcattaattaatcgacattttactcaagattaaggcgatcctatgaaacaaaaagtggttagcattggtgacatcaacgtagcaaatgacctgccgttcgtactgtttggcggtatgaacgtgttggaatctcgcgatctggcgatgcgcatttgcgagcactacgtaaccgtgacccagaaactgggtatcccttacgtgttcaaagcctcttttgacaaagccaaccgctcctccatccactcttatcgtggaccgggcctggaagaagggatgaaaatcttccaggagttgaagcagacttttggcgtgaaaattatcaccgacgttcacgaaccaagccaggcacagcccgttgctgatgttgtagatgtgattcagttgccggcgtttcttgctcgccagactgacctggttgaagccatggcgaaaaccggtgcggtaattaacgtcaagaaaccgcagtttgtcagcccgggacagatgggtaatatcgttgataaattcaaagaaggcggcaacgaaaaagtgattctttgcgatcgcggtgctaacttcggctatgacaacctggttgttgatatgctgggcttcagcatcatgaagaaagtgtctggtaattcgccggtgattttcgacgttacccacgcactgcaatgtcgcgatccatttggcgcagcttccggcggtcgccgtgctcaggtggctgagctggcaagagccggtatggcggtaggtctggcggggctgtttattgaagcgcatccggatccggaacatgcgaaatgtgatggtccatccgcgctgccgctggctaaactggaaccgttcctcaagcaaatgaaagcgattgatgatctggtgaaaggtttcgaagaactggataccagcaagtaatcttttttgcctgaaaaataaagtcttagcgttctgcgttaagacttttttcatgggtgccggatacaaaaaaggccgcaggctgttacccctgcggccggtttcgggcgcatattgccatcacggcagcctgacgcccgttttcaccttacttccggctacgccaccagccaacaatcgctgcggtaataattcccgcaaggatcggtgctgccaggtcgtgccagaaaatcacggcaaactgcgcgagcgtcatatagccgcctttttgttgtaatgacaacattttgcggctattcttgaattgttgatggttcaagattagcccccgttctgttgtcaggtttgacctctcaacgtgcgggggttttctctttccagcaaccaatgccgccagggataaagcccccacaacattgcgcctcaccggataacgccggcttggtgtcgatactacgtctcaatttatattcacttcatccctgaaatgtgcgcaatgctgtacgcgttccggcttttcatcagctgttgcagtggtttcgtgcaggttgtggtacaggctcgcaaatctgattaacaatctgttcaggtagtatgaagaaatactataagcagataatttttattatctcctccgatttccgccatcggaggagatataaatgtcaggcaaatattgtcattaaataagctgcaaacagtgccagatgcgccgcgccattgagcacgttagttcgtccggtggagaaggagatatggcacagtactaaagaggccaccatcaccaccatttctggcgcaccaagtgcaaactgcaattcgttacccgtcataaaggcaattagcgtgacgacaggtacggtaagcgaaatggttgccaacactgaaccaaagaacagattcatcgcgcgctggacctggttattcaacactgcttttaacgcacctaaaccttccggcgacagaatcaacagagccaccaggaagccagtaaaggcgacaggcgcattcatgctgtcgagcaatgtctccagcgggctggcgttcattttggtgactgcaataacggcaatcagatggacaatcaaccagatggcatgccacaggctgctatgggcagacggtttaccgtggtgcgggtcgtcatcatcactgtcatcttcgtgctcgtagacaaacaaactttgatgtgttttggtctggatcagcaaaaatacgccatacattgccgcagaaattaatgctaccagtaacgcctgacctgttgaaaaattcgccgcaggcagagccattggaaataccagtacgattatcgccagggggaacagcgcaattaaatactgcttgataccaaacagattcatatattgggtggcaaacttacgtccgcccaacaataatgaaaagccaaccagcccacctgtaacaatcataatgattgaatagagcgtatcacgcattagcgttggcgcggcgtcgccggttgccattaaagctgaaatcaaactgacttcaagaataaccactgaaaggctaagaataagcgaaccgtaaggttctcccaggcgatgggctaatacgtccgcatgacggacaacactaaaggcgctacttaaaataccaataagcgcaagaagattgatggcaatgaccactggtagtgtctggctgcttccccacaggaacagcactaccagcgccagaaccgggaaaataagcgaagtctccttgtggcgggtttttaccgcctcttgagcatttgacattatggttatccctttgcagatgaatttatcgaaaatgtaaaaaataggtaggaaaaataacagaaagtgtctggatatcggtaacattttacgaatttttaccccgctgtcgattttttactcatttgggcataaaaataagtaatacgtttagacaatgtttgttttagcacttcttaagaagagtctgacatgaaaattcttatgttttggcaagagtagatattgttgaccacacttaatgttcaactttgtaaaaggagtcaacgatgccgtataaaacgaaaagcgatctgccggaaagcgtaaagcacgtgcttccgtctcatgcccaggatatctataaagaagcgttcaacagcgcatgggatcaatataaagataaagaagatcggcgtgatgacgccagtcgcgaagaaacagcgcataaagtggcctgggctgctgtgaagcatgaatatgccaaaggggatgatgataaatggcataaaaaatcgtaaaaccggtagcttagttaaagctattcgttgcaagtggtccgtggattgcatattgtcccgttagtggtttcaaaatgagcagtaaaaatgtccggaagacaccaaaaagttgtcgcagggaagtatgcagtggcggaggtgtaaggtgataacgcgtgatttcttgatgaatgccgattgtaaaacggcatttggtgccattgaagaatcactcttatggtcagcagaacaacgggcggcttcgctggcggcgacgctggcttgtcgacctgatgagggaccggtgtggatcttcggttatggatcgttgatgtggaatccggcactggagtttaccgagtcgtgcaccggtacactggttggatggcatcgcgcgttttgcctgcgcctgaccgccgggcgcgggactgcgcaccagccgggacgaatgcttgcactgaaagagggcggacgcaccacaggcgtcgcctatcgactgccagaagagacgctggagcaggaactaaccctgctgtggaagcgcgagatgattaccggctgttatctgccaacctggtgtcagcttgatcttgatgatggacgcacagtaaacgccattgtgtttattatggacccgcgacatccagaatatgaatctgacactcgcgctcaggtcatagcgccgttgattgcggcggcgagcggtccgctgggaaccaatgcacaatacctgttttcactggaacaggagcttatcaaactgggaatgcaggacgatgggctgaatgaattgctggtatcggtaaaaaaactgctggcggagaattatccggatggtgtgttacggccgggattcgcctgagtaaactttcctcatagtggggcgtcagacgccccctcaaacattaaaatgtgagcactttatcggctgacagcgtccattgcgccagttcaacaagagtaccgatttccaccccatcaatcagaggaagtgtactaatcccgcgcccgtcggtacaggttttgcacaatttcaccggtacattctgagcggtaaggatctccagcatttgctgaatgttgtagccttcccctggtttttgcccgcgcaacccggctgttaccgcatcagacatcaggaacagacgcagatccagattgttctcctgctctcgtaacgcaatggccagccgcaagctgttaaacaaggattcgctcccgtaaggtgcgccattggcaacgatcacgattttttgcattatttactcctgtattcagggaattagacactcatcttctatcttactgcttctgcagcgtctgaccaatcggtcacatttttaaggattttcctgaaagcgcgagaaaatacgacaaaaggtgccagtaatcgttattctttaaggctatggtttttcatttttaccggaagttaccgacgttttgagccgtttcgttcctcgcattattccgttttatttactcttgctggcggcaggcggtacagctaacgcacaatctaccttcgagcaaaaagcggcaaatccctttgataataacaatgatggtctgccggatttaggcatggcacctgaaaatcatgatggggaaaaacactttgctgaaattgtgaaagatttcggcgaaaccagtatgaatgataacgggctggatactggcgagcaggcaaaagctttcgcattgggaaaggtccgcgacgcgcttagtcaacaggttaatcagcacgtagagtcctggctatcaccgtggggaaatgccagtgttgacgtcaaagtggataacgaaggacatttcaccggcagtcgtggaagctggtttgtgccgttacaagataatgatcgttatctcacctggagccagcttagtcttactcagcaggatgatgggctggtgagcaatgtgggcgttgggcaacgctgggcgcgcggcagctggctggtgggttataacactttttatgacaacttgctggacgaaaatcttcagcgagcgggctttggcgctgaagcgtggggcgaatatttgcgactatcggcaaacttttatcagccgtttgctgcatggcatgaacagacagccacgcaggaacaacggatggcgcgcgggtacgacctgacagcccggatgcgcatgccgttctatcaacacctcaataccagtgtcagcgtagaacagtattttggtgatcgtgtcgatttgtttaactctggtacgggttatcacaatcccgtcgcgttgagtctgggattaaattacacccctgtgcccttagtcactgtgacggcccagcataaacagggtgaaagtggcgagaatcaaaataacctcgggctgaatcttaactaccgctttggtgtaccgctcaaaaaacaactttctgcgggcgaggttgccgaaagtcagtcgttacgtggtagtcgctatgacaatccgcagcgaaataatcttccgactcttgagtaccgacagcgaaaaacgttgacggtgtttctggcgacaccgccgtgggatctaaaacctggcgaaacagtgccgctgaaattacaaatccgcagtcgttacggtattcggcaactgatttggcagggcgatacgcagatattaagtttgacgccgggcgcacaagccaacagtgaggagggctggacgctgatcatgcctgactggcaaaacggggaaggcgcaagcaatcactggcgattgtcagtggtggtggaagataaccaggggcagcgtgtctcctccaatgagatcacgctaacgcttgtcgaaccgttcgacgcattgtcaaacgacgaactgcgctgggaaccgtaatcagaaaatgcgctcctgatgcacccataccgcagcttccacgcgagactttagcttcattttcttcagcatgtgcttgacgtgaacttttactgtgctttcggtgatgtccaggcggcgggcaatcatcttgttcggcaaaccctgggcaattagcttgagaatatcgcgctcgcgtggggttaactggttaacatcgcgctcagtagtggcacggttagcgcgcaagctggcggccagaacaggcgttaatgcttcgcttaataccatttcgccagcagctgcctgatgtaacgctttcagcagatcttccggttccatatcttttaacagatagccatccgcgccgcgtttcagtgcggtgaccacatcttcttcatggttagagacgctgaataccacaatgcgcccggagagggacttttcgcgcagtttatccagcgtttccagaccgttcatgccgggcatattgagatctaacaggatcagatcgggatcaagagactccgccagttcaataccctgttcgccattactcgcttcgccaaccacggtgatatctggtgccatactgataagctgttttacgccagttcgcaacatcgggtgatcgtcgatcagcaggatagtagccggttcctgattactcatgggtatctccttggacgtctgtgaaagttttttcgggaataaaggtgaccaccacttcggtgccacctgattcacgacggcggacgcggcaatcgcctcgtaaactttgcgcacggtcgcgcattattatcatgccgtagtgattgctgcggatggcattttcaggcacgccgcagccgttatcctggacggtcagtttgacctgattatcgttttgcgccaccgtcaccacgacctcactcgcttgcgaatgtttgagggcgttacttaatgcctcacgggcaatttgcaacaagtggattgcctgatgcgaaggcaccagacgaggcggcaattgataatccagcttcaccgggaagccaaatttggcgctgtactcttcgcaactcgcctccagcgccggacgtaatccaggctcggtgagctgcaaacggaatgtggtgagcaattcacgcaactgcacccaggatgcattcagttcgttacggatctgacttaacagttcgcggctgctttctggcagcgcatcgccctgcatctgtaagcaactcacctgcatcttcatgcaagagagagattgggcaatagaatcatgcagttcgcgcgcaatggtggcacgctcttccatcacgatcaactgttgctgacgttcctgatggcgatccagcgccagcgtggcggtgagttgttcaaccagggtatccaccagttgttgttgatcatggctaagatgacgcccctgcggcagggtcgccagcaaaataccgtactgcgtatgagtgtcagccagccgccacttcagggttgtgccgcgatcgccaacgggtaatacgccgcgcgggcagagctggcagcctttatcatcacaagtcatatctggctggcaggtaaactcctgatgattctcttcatcatcagtgtcatacacccgcagttcgatatcacgtagcagggttaaattctgtaatccgttgagtacaggtgacaggcgttcacacagcggggcgcgggaatgcaaacggcggttagcctgccataaaaaagagaggatctgatttttatgctccagcccggcggttttctcctgaacccgctgctcaagtacggcataactttcggccagttctgcagacatattgttcaacgcagttccaagcatcgccatttcgttgcgcccgctgatgtttgcgcgttgggtaaaatcgcgatggctgacggcactcgccattgccagcagttgccgccacggttgtagcaatctcgcccgcaaccagataatagtgaataccagtaaaagtgccataaataccgccattacccgatggaccagcaccactgtctcaatgcgcatttccgtggtgcgatcaaaaccagataccagctgatcaagcccggcaacaaactggctgacatccgctgacaccgtttcgcggttttgtgcacgtatcagtgcagggatcagttcattacgccagtaatcttgtaaaccctgtaattgcgccagttgcccgtctcgttctgctgctcgagtcaactcggcgctaaatgctgtttgttccatctctttaattaagggcttgtctttctcgcttaatggcactgctgccaacagacggtaactttgcatgcgcagcgatcccgctttgttgatcgcatgggcgctgccctgaacgccttgcaccagccagccagaaaccgccatccctgccagtccaatagcagtagaaagcaacacaataagcgcaacctgattaaccagggtgagcggagagagacaacgtttaagcatgtaaacctcttccttcaggctttaaatgagcaataaccttaatgaatgtgacgatacattctggaatggcagtattctcggctattggctgaagtatacccatacccggaaagagttactccttatttgccgtgtggttagtcgctttacatcggtaagggtagggattttacagtaccgtgaaaaatctcataatttttatgaaatcactgtactcactatggataatgataaatatcaatgatagataaagttatcttatcgtttgatttacatcaaattgcctttagctacagacactaaggtggcagacatcgaaacgagtatcagaggtgtctatgagtcactcatccgcccccgaaagggctactggagctgtcattacagattggcgaccggaagatcctgcgttctggcaacaacgcggtcaacgtattgccagccgcaacctgtggatttccgttccctgtctgctgctggcgttttgcgtatggatgttgttcagcgctgttgcggtgaacttaccgaaagtcggttttaattttacgaccgatcagctatttatgttgactgcgctgccttcggtttctggcgcgttattacgtgttccatactcctttatggttcctatcttcggtggtcgtcgctggacggcgttcagcaccggtattctgattattccttgcgtctggctgggttttgccgtgcaggatacctccacgccttatagcgtcttcatcatcatttctctgctgtgcggctttgctggcgcgaacttcgcatccagtatggcaaacatcagcttcttctttccgaaacagaagcagggtggcgcgctgggtctgaatgggggtctgggcaacatgggcgtcagcgtcatgcagttggttgctccgctggtggtatcactgtcgattttcgcagtatttggtagccagggcgtcaaacagccggatgggactgagctgtatctggcgaatgcgtcctggatatgggtgccgttacttgccatcttcaccattgcggcgtggtttggcatgaacgatcttgccacctcgaaagcctccatcaaggagcagttgccggtactcaaacggggtcatctgtggattatgagcctgctgtatctggcaaccttcggctccttcatcggcttctccgcgggctttgcgatgctgtcaaaaacgcagttcccggatgttcagattctgcaatacgctttcttcgggccgtttattggtgcgctggcgcgttctgcaggtggtgcattatctgaccgtctgggcggaactcgtgtcacgctggtgaactttatcctgatggcgattttcagcggcctgctgttcctgaccttaccgactgacggacagggcggaagcttcatggcgttcttcgcagtcttcctggcgctgttcctgaccgctgggctgggtagtggttccactttccagatgatttccgtgatcttccgtaaactgacaatggatcgcgtgaaagcagaagggggttctgacgaacgtgcgatgcgtgaagcggcaaccgacacggcagcggcgctgggtttcatctctgcgattggcgcgattggtggcttctttatcccgaaagcgtttggtagctcgctggcattaacgggttcgccagtcggcgcaatgaaagtatttttgattttctatatcgcctgcgtggtgattacctgggcggtatatggtcggcattctaaaaaataaatcgtaatatttgattatcctttgcgcggcatgatgtcgcgctttttttatgcgtcatttagttacaacatactaatgttgtatggcttatttcgctggatttcattaagagtcattaatatgttacccatggggaatactccttaatacccatctgcataaaaatcttaatggtttaaataactacaggtgtaaaacgtcttaatttacagtctgttatgctataaatgttaattatcctaaaggggtattccaggaatttactttatttttcatccccatcactcttgatcgttatcaattcccacgctgtttcagagcgttaccttgcccttaaacattagcaatgtcgatttatcagagggccgacaggctcccacaggagaaaaccgatgagtaaattcctggaccggtttcgctacttcaaacagaagggtgaaacctttgccgatgggcatggccagcttctcaataccaaccgtgactgggaggatggatatcgccagcgttggcagcatgacaaaatcgtccgctctacccacggggtaaactgcaccggctcctgcagctggaaaatctacgtcaaaaacggtctggtcacctgggaaacccagcagactgactatccgcgtactcgcccggacctgccaaaccatgaacctcgcggctgcccgcgcggtgccagctactcctggtatctatacagcgctaaccgcctgaaatacccgatgatgcgcaaacgcctgatgaaaatgtggcgtgaagcgaaggcgctgcatagcgatccggttgaggcatgggcttctatcattgaagacgccgataaagcgaaaagctttaagcaggcgcgtggacgcggtggttttgttcgttcttcctggcaggaagtgaacgaactgatcgccgcatctaacgtttacaccatcaaaaattacggcccggaccgtgtcgctggcttctcgccaattccggcaatgtcgatggtttcttacgcatcgggtgcgcgctatctctcgctgattggcggtacttgcttaagcttctacgactggtactgcgacctgcctcctgcgtctccgcaaacctggggtgagcaaactgacgtaccggaatctgctgactggtacaactccagctacatcatcgcctggggttcaaacgtgccgcagacgcgtaccccggatgctcacttctttactgaagtgcgttacaaaggaaccaaaactgttgccgtcacaccagactacgctgaaatcgccaaactgtgcgatctgtggctggcaccgaaacagggcaccgatgcggcaatggcgctggcaatgggtcacgtaatgctgcgtgaattccacctcgacaacccaagccagtatttcaccgactatgtgcgccgctacaccgacatgccgatgctggtgatgctggaagagcgcgacggttactacgctgcgggtcgtatgctgcgcgctgctgatctggtggatgcactgggccaggaaaacaatccggaatggaaaactgtcgcctttaataccaatggtgaaatggttgcgccgaacggttctattggcttccgctggggcgagaagggcaaatggaatcttgagcagcgcgacggcaaaactggcgaagaaaccgagctgcaactgagcctgctgggtagccaggatgagatcgctgaggtgggcttcccgtactttggtggcgatggcacggaacacttcaacaaagtggaactggaaaacgtgctgctgcataagctgccggtgaaacgcctgcaactggctgatggcagcaccgccctggtgaccaccgtttatgatctgacgctggcaaactacggtctggaacgtggcctgaacgacgttaactgtgcaaccagctatgacgatgtgaaagcttacacccctgcctgggcagagcagattaccggcgtttctcgcagccagattattcgcatcgcccgtgaatttgccgataacgctgataaaacgcacggtcgttcgatgattatcgtcggcgctgggctgaaccactggtatcacctggacatgaactatcgtggtctgatcaacatgctgattttctgcggctgtgtcggtcagagcggcggtggctgggcgcactatgtaggtcaggaaaaactgcgtccgcaaaccggctggcagccgctggcgtttgccctcgactggcagcgtccggcgcgtcacatgaacagtacctcttatttctataaccactccagccagtggcgttatgaaaccgtgactgcggaagaactgctgtcgccgatggcggataaatctcgctataccggacacttgatcgactttaacgtccgtgcagaacgcatgggctggctgccgtctgcgccgcagttaggcactaacccgctgactatcgctcgcgaagcagaaaaagccgggatgaatccggtggactatacggtgaaatccctgaaagagggttctatccgtttcgctgcggaacagccggaaaacggtaaaaaccacccgcgtaacctgttcatctggcgttctaacctgctcggttcttccggtaaaggtcatgagtttatgctcaagtacctgctggggacggagcacggtatccagggcaaagacctgggtcagcagggcggcgtgaagccggaagaagtggactggcaggacaacggtctggaaggcaagctggatctggtggtgacgctggacttccgtctgtcgagcacctgtctctattccgacatcattttgccgacggcgacctggtacgaaaaagacgacatgaatacttcggatatgcatccgtttattcacccgctgtctgcggcggtcgatccggcctgggaagcgaaaagcgactgggaaatctacaaagccatcgcgaagaaattctccgaagtgtgcgttggtcatctgggtaaagaaactgacatcgtcacgctgcctatccagcacgactctgccgctgaactggcgcaaccgctggatgtgaaagactggaaaaaaggcgaatgcgacctgatcccaggtaaaactgcaccgcacattatggtcgtagagcgcgattatccagcaacttacgaacgctttacctctatcggcccgctgatggagaaaatcggtaacggcggtaaagggattgcctggaacacccagagcgagatggatctcctgcgtaagctcaactacaccaaagcggaaggtccggcaaaaggccagccgatgctcaataccgcaattgatgcggcagagatgatcctgacgctggcaccggaaaccaatggtcaggtagctgtaaaagcctgggctgccctgagcgagtttaccggccgtgaccatacgcatctggcgctgaataaagaagacgagaagattcgcttccgcgatattcaggcacagccgcgcaaaatcatctccagcccgacatggtctggccttgaagatgaacacgtttcttacaacgccggttacaccaacgttcacgagctgatcccgtggcgtacgctctctggccgtcagcagctgtatcaggatcaccaatggatgcgtgatttcggtgaaagcctgctggtttatcgtccgccgatcgacacccgttcggtgaaagaagtgatgggccagaaatccaatggcaacccggaaaaagcgctcaacttcctgacgccacaccagaagtggggtatccactccacctacagcgacaacctgctgatgctgactttaggtcgcggtggtccggtggtctggctgagtgaagccgatgccaaagagctgggtatcgccgataacgactggattgaagtcttcaacagcaacggtgcactgactgcccgtgcggttgtcagccagcgtgttccggcagggatgaccatgatgtaccacgcgcaggaacgtatcgttaacctgcctggttcggaaattacccaacagcgtggtggtatccataactcggtcacccgtatcacgccgaaaccgacgcatatgatcggcggctatgcccatctggcatatggctttaactactacggcaccgtaggttctaaccgcgatgagtttgttgtagtgcgtaagatgaagaacattgactggttagatggcgaaggcaatgaccaggtacaggagagcgtaaaatgaaaattcgttcacaagtcggcatggtgctgaatctcgataagtgcatcggctgccacacctgttcagtgacctgtaaaaacgtctggaccagccgtgaaggcgtggaatacgcgtggttcaacaacgtggaaaccaagccgggccagggcttcccgactgactgggaaaaccaggaaaaatacaaaggcggctggatccgtaaaatcaacggcaaactgcagccgcgcatgggtaaccgtgccatgctgctgggtaaaatcttcgctaacccgcatctgccggggatcgacgattattacgagccgttcgattttgattatcagaacctgcataccgcgccggaaggcagcaaatcacagccgattgcccgtccgcgttcactgattaccggcgaacggatggcgaaaatcgaaaaagggccgaactgggaagatgacctgggcggtgagtttgacaagctggcgaaagacaagaacttcgacaacatccagaaggcgatgtatagccagttcgaaaacaccttcatgatgtatttgccgcgcctgtgcgaacactgtctgaacccggcatgtgtggcgacctgcccgagcggtgcgatttacaagcgtgaagaagatggcatcgtcctgatcgaccaggataaatgccgtggctggcgtatgtgcatcaccggatgcccgtacaaaaaaatctacttcaactggaagagcggtaagtctgagaagtgcatcttctgctatccgcgtattgaagccggccagccgacaatatgttcagaaacctgtgtcggtcgtatccgttatcttggcgtgctgctgtacgatgccgacgcgattgaacgtgcggcaagtaccgagaacgagaaagatctctaccagcgtcagctggatgtgttcctcgatccgaacgatccgaaagtcatcgagcaggcgattaaagacggtattccgctgagcgttattgaggctgcgcagcagtcgccagtttataaaatggcgatggaatggaaactggcgctgccgctgcatccggaatatcgcacactgccgatggtctggtacgtgccgcctctgtcgccgattcagtctgcggcagacgcgggtgaactgggcagcaacggcattctgccagacgtcgaaagcctgcgtattccggtacagtatctggcgaatctgctgaccgccggtgataccaaaccggtactgcgcgcgctgaaacgtatgctggcgatgcgtcattacaaacgtgctgaaaccgttgacggtaaagtcgatacccgtgcgctggaagaggtcggtctgaccgaagcccaggcacaggagatgtatcgttatctggctattgccaactacgaagatcgctttgtggtgccgagcagtcatcgtgaactggcgcgggaagccttcccggagaaaaatggctgcggctttacctttggtgatggctgccacggttcagataccaaattcaatctgttcaacagccgccgtatcgatgccatcgatgtaaccagcaaaacggagccgcacccatgatcgaactcgtgattgtatcgcgtctccttgaatatccggatgctgccttatggcagcatcaacaagagatgtttgaggcgattgccgcgtcgaaaaatctgccaaaagaggatgcccatgcgctgggcattttcctgcgcgatttaacgacgatggatccgctcgatgcccaggcgcagtacagcgaactgttcgaccgtggccgcgccacgtcactgttgctatttgaacatgttcacggtgaatcccgtgaccgcggccaggcgatggtggatctgctggcgcagtacgagcagcacggcttgcagttaaacagccgcgaattgcccgaccatctgccgctgtatctggagtacctggcgcagctgccgcaaagcgaagccgtggagggtttgaaagatattgcgccgattctggcattgctgagcgcgcgtctgcaacagcgtgaaagccgttatgccgtgctgtttgatctgctgctgaaactggcgaataccgcaatcgacagcgacaaagtggcggaaaaaattgccgatgaagcgcgcgacgatacgccgcaggcgctggatgcagtctgggaagaagagcaggttaaattctttgctgaaaaaggctgcggtgattcagcaatcactgctcatcagcgtcgctttgccggtgccgtcgcgccgcaatatctgaatatcaccaccggaggacagcactaatgcaattcctgaatatgttcttctttgatatctacccgtacatagccggggcggtcttcctgattggtagctggctgcgttatgactacgggcagtacacatggcgtgcggcgtccagccagatgctggatcgcaaagggatgaatctggcgtcgaacctgttccatatcggtattctggggatttttgtcggtcacttcttcggtatgctgacgccgcactggatgtatgaagcctggctgccgattgaagtaaaacagaaaatggcgatgtttgctggtggtgccagcggcgtactgtgtctgattggcggcgtgctgttgttgaaacgtcgtctgttcagcccacgcgtgcgtgcaacgactaccggagcggatatcctgatcctgtcgctgctcgttatccagtgcgcgctgggcctgctgaccattccgttctccgcccagcatatggacggtagcgagatgatgaaactggttggctgggcgcagtcggtagtgaccttccacggtggcgcttctcaacatcttgatggcgtggcgtttatcttccgtctgcacctggtgttggggatgacgttattcctgctgttcccgttctcgcgtctggtacacatctggagcgtcccggtggagtatctgacgcgtaagtatcagctggtgcgcgcccgtcactaattatctaaaccaaacatcggtggttacacactgccgatttttcggattgtagggaaacgtacttcatctatatgattggtccacctatggagcagtgaaggagcactgaccgtggctcgacctaatcaaccgacgatctccgcggcgttaaaaataatcgccacggggatcgccttaccccctgatcaaatcacttctcaacaactggatgttcagttaaataagccagttggctatgttgagcgacgttccggtatttgctggcgctattttgcccgcaacgacgccagccaggccgaactggcggcagaggctttacataatgcgttagtagcggcagccttaaatcctactgatattgatctgctaatttgtgcatcggccattgccgtacaggcattaccctgtagcgcaattcatattcttaaagccgcagccatgcccgcaggcgttgccgggtttgatatcaacagtagctgtgtgagctttatttccgctcttgaagtcggtgccggattattaaactgtggagcatatcggcgcattgccatcgtttcggcagatattgcttcacgaggtatcgactgggatcatgaagagtcttcattaatttttggtgatggcgcggcgtgcgcgattgttgagcggggcgatgggcgcagcgggattatcgctagcctgatcgaaatgtatcccgaaggcagcgaactgtgtgaaatacgcgccggcggtacgcggcgtaatcctcgttctggtgtgagtgatagcgactttctttttcatatgcaggggaaaccgctgtttcgttttgcttcttcgcttattgaagattatttttctcggttgctgcaaaaaagcagcctgcaactggatgatatcggcacggtcgttccacatcaggccagtcatctttcccttgaacatatgcgtaaacggctgcgagtgccggaatctgcgctcatcgatgtgtatcgtttttacggcaatcaggtcgcggcctctatccccacggcgctgcatgaagcagtgattagcggtcgtttcacagcggataaacctgtaatgttgattggcacggcagcgggactaacgctggctggcatggtgcttttaccgtgaagatcctcgtaacaggggcgaccagcggccttgggcgaaatgccgtgcaatatttgttgcaatcgggtgagtcggttgtggcaacagggcgaaattgtgaggttggcagaagcctgacaaacgcaggcgcacagtttgtggctctcgatttaaccgaggcatccgaggatgactgcgcccgcctgatggacggctgcgatgccgtctggcactgtgcggcaaagtcctcgccctggggcgacaaaacggcgttctggcttgccaatgtcaaagtgacccacactctggcacaggcggcaggcaggctgaatattccccggtttatccatatctccacgcctgcggtttactttgattttcaacatcacaatgacctgccagaaacgtatcttgcgcgagcattctccagccattatgccagcagtaaatatgccgctgagcaggttattgctggcgctgtttctcgatattctgccacgagatttattcttttgcgtccccgtggtttgtttggcccccatgaccaggtaattgttcctcgtctgatgcagcaattgcaacagggcggtggttgcttacgtttgccgcgcgggggcgacgcgttattggatctcacgttcgtgcaaaacgtggtgtatgccatgcggctggcaacgaacgttgaaggcttacgctcgggcagtatttacaacatcagcaatcaccagccgcagcagctatcggtgatgcttgacgccttgctgcaccagcaactgggcttgagttaccgcattgctgctgttccctggtcgctgctttctctggtcgcgcgtggcctggaactgtacgggaagtgcgttaatcaggaacctgttatcacacgatacagcgccggaacactctgtttcgatatgacgctgagtgcgcaaaaggccattacagagctgggatatcgaccgcgcttttcgatggaacaaggtattgcaatcacgggacaatggctgagggaacatggcaaaaataaccgcatttgaaacgggctggtgtacccatattagctgtattgcgctgaaaggggcagggctgaaagtgtgcaaattccccgcccgcgcctggctgctggaggtgggcgacaaacggtggctgtgggacacaggctattcatcgtggttcgaacactacacgcaatctggtgtgtttcgtctttatcgtcaggtcacgccggtttatttcgatccgcaacaggcgctggtgcggcaactttctgccaccggcctcgcagcgaaagatgttgatgcgattattctgtcgcattttcacgctgatcatattgctggtctgcgtgattttcctgatgtttcctgcatctgttctggtgaaggctggcggcaagtaagaactctgcgtggtgtcactgcgctgcgccaggcctttgtgccagggctaatcccggagaattttgactcctcactgcgctttattgaaagtttcgcatcggtgaatttgcccgcgcaactggcaccgtttgagtgcggctatttgctgccagaaagcaatggcgaaattattctcgtgccgcttcccggacatgctgccggacatattggcgcgtttgtgttaaccgacaacggctggactttactggctggcgatgcggcatgggcgccagctaactaccgggagctgcgagggccttcaccactggcgcatctggttatgtccgacagccacgcctactaccacacgcttgggcaactccatcagctttggcaaaacggtgtagtggagattcgtttgtgccatgagggggatttatgatcccgttggctttactctggcgctactttcgtacccgcaagctgcatttcaccgatcgcgaggcactggaaaactggcaggcaaaaaggctgcatcagttccggcaaaatgtcttatctcatagcccgtggtttcagcgttatctgacgttgccctttaatcagtggccaatgatggataaagcgttaatgatgacgcacttcgatgagatgaataccgcaggtttaaagcgcgacgaacttctcgattgtgcaatgcgcagtgagcagagtcgtgatttcaaaccctgcgttggcaggttcagtgttgggctttcatcaggtacatcgggtcgtcgtgggctttttgttgttagcccgcacgagcaacagatgtgggccgccggtgtgctggcaaaagtgttgcccgacggtttatttgccaaagagcgggtggcgctgtttctgcgcgcggacaacaacctgtatcaaagcgtgaataatcgctggttaagtctcgatttttacgatctgctagcgccatttcaggcgcaactcaaacttctccaacagcgagcgcccacgattattgtcgcgccagctcaggtattacgcgcactggcgctggaggtgatggccggcgaattgacgctaaaggtcaaaaaagtgatttcggtggcggaagttctggagccgcaggatcgggaattactgcgcaacgtgttccacaatgtgggggaaatttatcaggcgacagaaggctttctcgcttccacctgccggtgtggaacgttacatctcaacgaagagtttgttcacattgaaccgcaatggctggatgagcaccgtttcgtgccgatcgtcacagactttacccgcaccacacagccgatagtgcgttatcgactggatgatgtgctggtggcaagcgaacaaccatgctcctgtggcagtgcaacaatggcgattgcgcgtatcgaagggcggcaggatgaccaactgcaactaccaacaagatccggcgatattcagaccgtttttgccgatgcctgtagtcgtgtgctggcaatgacactgccgctaacagtcgattatcgcctgctacaaaccgggtcagcacaattgacgttaatcgccgattgcgagctgtggatgctggagcattgccgggaggcgttgaatgccttgtttatacgccaggatatcgctgtcgggcaattaatttggtcgctggaaccgcaaactgtgccagtctcttttacagccaagcggcggcgcattgtgcgtcagtgggggcgggaatgagcaattcactgctacgcctgaaacagatgctgctgggctggggaactgttggggttatctacaactttagcgactacctgcaaggtgagggatatcaattaacaccgtcaataattgataattggatttcgttttccccctccgctgtgtggctgtatctctcgttttttttcattgtgccgttaggttatttatccacgccactttgccacctgcgctggctggcccgttcaatgcaaatttccgcactggtggcaggcgtattttatcttctctggcccacaaccatgcattatccctcgtttgatcagatggggatatccgcgggcgcactcaacaggctgatcgccattgactcaagccagaactgtttcccctccttacacgccgcgctaacgctgttggcggtatgggcgattgccaaaaaggggaaccgttggctgacgctaatgagcgtggtctgggcgatagcaatcgccttttcgattctgcaattacgcagacatttatttatcgatttagtaggcggcgcgttgctggcgtcgatttgcggttggatatgcgcaacatgcgagaaaaggaagacacaatatgagtgatttattattccccatcatatcgatggtgctgttggtgttagccgaagcaggcgtgttgcaattcaccgggcggcaaaaagtggactggctggacgttatttttaatatcaactccggtcatatgatgctgtggttatttcgctgcctggaagtgctctgctatggcctggtgatcaatcacttcagccttggactgtttgataatgcaccggtgatcctgctgtggttgtttactatcctggcgtgggatttcggcttttactggctacatcgctggcatcacgaaatgcgcccgctgtgggcggtacatgtggtgcatcatcagggggaacactacaacctgtcattaggcgtgcggaattcgtggtactcctcgttaacctcaatcccgttttttatgctgctggcgatgcttggtgtgccgttgcagatctttttggcggtttctattattcactatagttggcaattttttaaccataacgcactaacgccgaaactgggctggctggaaaaagtgctgatcacgccttcgcatcatcgcgtccatcatctgaatcaaaagcaatatgccgataccaattacggtggcacctttttgttgtgggataaacttttcggttcgtatagtgccgggccggaatacgacgtaggctacggcgtaaaaaatagtcgcttgtcctgtaacccgatgcgcgagagtaatctgccatttttacgcttaatgggctttcgctcatttggcaaagcgattgaaggtcgctaccagagttctccatgggcggtaggggcaggggtgatcctgctgtttatgctggtgcttggctacattcaacaatatggctatggcattgagtttattaccagcgagcaagccgtattatttgttctgctggcggcaggctccgttgcgctggggggcatgagcgacgggcagcattggggtatgattttgtggtgctctgtgacgttgtcactgctctattttattgtctatatgtgttcatggagtactctgctctggaagggattagtgggtattctgctggcccattgcctgttatttgtaatcggcgtaggacgtaaatcgctaaggaaacagtatgaacctgtttaatcccgacaggttaatcacttttcctgccgatgatccacaactggtgaaacaactgcaaagcggtacgaaagtttatctggcgaaatcaggcgatcatcggtatgccgacggctgggcattcgccaaaatggcggcgttgattattgcctgtttatgctgctatgcactggcgttgtctcaaagcctgtgggggctgtatctgttgtggtatctcgcgatgatgttttgcgccatgttgttagcggtcaatgtggtgcatgacgcttcgcatgatgcgtttttgcgtggtaaaaagaccaatgcccgacttaaccggtgggttgcttttcctatggggctagatccggactgctggcgggtgcgccacgttcgctttcatcacggttttaccaatattgaattttacgatccagacacagcagaaaatggcattcttcgccagacgccgtggcaacggtggcgaccttttatgcgccagcaacatcactattggccactggtcgccgcgctcacctttccctggtatatctgggtagtggactggctcgatcgcgcagggtttacgccggtcacgcgacatctggccctgcgaggctttgctggctggggatatttcttagccgggaaactggcgcattgtgcgctgtgtctgatacttccctggcttttgtctgattttagttttatgaccatcctgctgacttatctgctcagccagctgctggcgtcattgatttttgtgacgttgattattggaacgcactgggcgaagggacatacgcagttaccaccagaagagggcaaaatgcccgtgggcagactggcgcatacctttgttaccacctttgactggacgccgcaacctgcatggcttggctactggctgggcgggattaatctgcaccttacccatcatctgtttcctcactggcatcatcgccattatccggcgctaagccgcattattgcacaaattgccagccagcaaggtctggattatcagttgttgacgttagcggatttgttgaggctacagcagcagtttttacggcgaatgggggagaagccgaaggcttgataatggaatcaagtgatggtggtgggggaaggattactcagcgctgcgcgcttcgccctacgggtcgttgcctgcggcaacgctctctcgctggcactcgagtcgaaccttggtcgaagcttctcatccttccccgcatgggcagaatatttaattgcggattcgtttgagaattcaggggcttttgaaagcgatggtggtgggggaaggattcgaaccttcgaagtcgatgacggcagatttacagtctgctccctttggccgctcgggaaccccaccaggggtaattcatattgtaggtaatgcttgagatggtggtgggggaaggattcgaaccttcgaagtcgatgacggcagatttacagtctgctccctttggccgctcgggaaccccaccacggggtaatgctttttactggcctgctcccttatcgggaagcggggcgcatcatatcaaatgacgcgccgctgtaaagtgttacgttgagaaaaatgaactggttgcgtaattttcatccgtaacggattaaagctaaccagttatttttgctggcgattaaagaataatcgtccgattaccgtaaacaaagacgcgctgcgccagtactttgtatagcgcacgacttaagacgtttttctcgacgtcacgacctgcgcgcatcatatcttcagctgtgtaggtatgatcgacatgaataacgtcctgcatgatgattgggccttcgtccagattgtcattcacatagtgagcggttgcgccaataatcttcacgccacgctcataggcctggtgataaggacgtgcgccgataaacgctggcaggaatgaatggtgaatattgatgatcttattcgggaagcgtgccacaaattccggcgttaatacccgcatatacttcgccagcaccacatagtcaggttgataagcatcaatggcatccgccatcttttgatcgtgctcgttgcggcttaacccttcatggcttaccagctcaaacggaatatcaaaccgctcaaccagagaacgtaaagtatcgtggttaccaataactgccgcgatttcgacatccaggccgccgtaattggctttcatcaacaaatcgccaaggcaatgcgcttctttagtgaccagaatcactatccggcgacgaccggcaggattcagctcgcgcacggagccttctggcaatgcgctatcgagatccgccagcagggtggaatcattaaaaatcccttccagttccgtgcgcataaaaaagcgcccggtacgatgatctacaaattcattgttctgcacgatatttaactcgtgcttgtagcaaatattggtaatacgtgcgatcagacctttttggtccggacaaatagtacgcagaactttacgttggagtgaatgcattgctggaaaaaccttgttgagagtgtttgctaaaccgtaccgtcaaccattattggccgcagcactttttaaattttttacctgaaccacaagggcagggatcgttgcggccaaactgcggacgtgtaccgtcaatatagtaccattgaccgttttctttcaaaaatcgcgaacgttcaattattgcacctgttttgccaccctcggtaaatcgagcaacaaaactgacaaatccgatattgccgccgtcctgccagcaatgttcaaatacggtcaatcccaaccattcagtatgcgcaaatccggcaatcaattcggctcgtaacgccgctgctccacaagatggatgccaggtctttattaaataatctgcgtcttgcatcacaaaagcgcagtaacgcgaacgcatgagatgttctggatcaggtgcaaccttttcaccagacacataagggtggcaacataggctatactcgacagcactaccacagggacaaagctgagacacaaataatctccctggaaacaataacggcgtattaaccgcctgagtagcactatgttaaccgagcagtagcgatgtggctacgattgcattccaggggaatcttgcgggaataatgagaaagataaaaatagggctggcgctgggatctggcgcggcaagaggttggtcgcatattggcgtaattaatgcgctaaaaaaagtgggtattgaaattgatatcgttgcaggatgttcaattggttcgctggtgggcgctgcctatgcatgcgatcgattatctgcgctggaagattgggtgacctctttcagttattgggatgttttacgcctgatggatctctcctggcagcgcggtgggttactgcgcggcgagcgtgtcttcaatcaatatcgcgaaataatgccggaaacagagatcgaaaattgttcccgtcgcttcgcggctgttgccaccaatttaagtactgggcgtgaattatggtttactgaaggcgatctccatcttgctattcgtgcatcatgcagtattccaggactaatggcacccgttgcgcataacggctactggctggttgatggcgctgtagttaacccaattcctatttccctcacgcgtgcattgggggctgatattgtgatagcggtcgacctgcagcacgatgctcatttgatgcaacaagatttgctctcctttaatgtcagtgaagaaaatagcgagaatggtgattctctgccgtggcatgcgcgtctgaaagaaaggttaggcagcataacgacacgtcgggcggtgacagcgccaacggcaacagagattatgaccacttctatccaggtgctggagaaccgccttaaaaggaaccgcatggcaggtgatccgcccgatattctgattcaacctgtttgcccgcaaatatctacgcttgatttccatcgcgcgcacgctgccattgcggccggacaactggcagtggaaaagaaaatggacgaacttttgccgttggtacgcaccaacatttgaccagaatttttatctacacttaagttaattctgacaggcgtaggtggcaatagcgtgccactattgagtaaagccagtcaggggagagaacatgacgcagccattggtcggaaaacagattctcattgttgaagatgagcaggtatttcgctcgcttctggattcgtggttttcctcattgggagcgacaacggtactggcggctgatggggtggatgcccttgagttgctgggaggtttcactccagacctgatgatatgtgatatcgcgatgccacgaatgaacgggcttaaactgctggaacatatacgcaacagaggtgaccagacaccagttctggtgatatctgccactgaaaatatggcagatattgccaaagcgttacgtctgggtgttgaagatgttttgctgaaaccggttaaagatctgaatcgcttgcgcgagatggtttttgcctgtctctatcccagcatgtttaattcccgcgttgaggaagaggaaaggctttttcgcgactgggatgcaatggttgataaccctgctgcagcggcgaaattattacaggaactacaaccgccggttcagcaggtgatttcccaatgccgggttaattatcgtcaattagttgccgcggacaaacccggcctggtgcttgatattgccgcactttcggaaaacgatctggcattttattgccttgatgtcacccgagctggacataatggcgtacttgctgccttgttattacgcgcattgtttaacggattattacaggaacagcttgcacaccaaaatcaacggttgccagagttgggcgcgttattgaagcaggtaaaccatttactccgtcaggccaatctgccggggcagtttccgctattagttggctattatcatcgcgaactgaaaaatctcattctggtttctgcgggtctgaatgcgacgttaaataccggcgaacatcaggtgcaaatcagtaatggtgttccgttaggcactttaggtaacgcttatttgaatcaattgagccagcgatgcgatgcctggcaatgccaaatatggggaaccggtggtcggctgcgcttgatgttgtctgcagaatgagcaaacgataacacgggctaaatttgcattacctgctaatgtcggctggtggtactatcgtcgctattcgtataagtaattgtcttaattatgctaactcgcctccttttcagaacttagccccttcggggtgctgatatactgggatgcgatacagaaatatgaacacgttcaaaacacgaacagtccaggagaatttaaatggctgccattaatacgaaagtcaaaaaagccgttatccccgtagcgggattaggaaccaggatgttgccggcgacgaaagccatcccgaaagagatgctgccacttgtcgataagccattaattcaatacgtcgtgaatgaatgtattgcggctggcattactgaaattgtgctggttactcactcatctaaaaactctattgaaaaccactttgataccagttttgaactggaagcaatgctggaaaaacgtgtaaaacgtcaactgcttgatgaagtgcagtctatttgtccgccgcacgtgactattatgcaagttcgtcaggggctggcgaaaggcctgggacacgcggtattgtgtgctcacccggtagtgggtgatgaaccggtagctgttattttgcctgacgttattctggatgaatatgaatccgatttatcacaggataacctggcagagatgatccgccgctttgatgaaacgggtcatagccagatcatggttgaaccggttgctgatgtgaccgcatatggcgttgtggattgcaaaggcgttgaattagcgccgggtgaaagcgtaccgatggttggcgtggttgaaaaaccaaaagcggatgttgcgccgtctaatctcgctattgtgggtcgttacgtacttagcgcggatatttggccgttgctggcaaaaacccctcctggagctggtgatgaaattcagctcaccgacgcaattgatatgctgatcgaaaaagaaacggttgaagcctatcatatgaaagggaagagccatgactgcggtaataaattaggttacatgcaggccttcgttgaatacggtattcgtcataacacccttggcacggaatttaaagcctggcttgaagaagagatgggcattaagaagtaacatccgtatcggtgttttccacgaaacggtgttgagcaatcgacgccgtttttttatagcttattcttattatattgtcttaaaccggacaataaaaaatcccgccgatggcgggatttttagcatgtgcaatctacaaaagattattgcttgatcaggaaatcgtcgagggatttaccttgctcatccattgcttttttgattacagctggagtacggccctggccagtccaggttttagtttcgccgttttcgtcaacgtagctatattttgccggacgctgagcacgcttagctttggtgccagatttaacggcagcaaggctattcagcagttcgttcgggtcaataccgtcagcgatcagcatttcgcgatattgctgcagtttacgagtgcgctcttcaacttcagcagcagccgcgctttcttcttcgcgacgttcgttaacaacaacttctaatttttccagcatttcttccagcgtttcaagtgtacattctcttgcctgcgcacgaagagtacggatgttgttcagaattttaagtgcttcgctcattgtagtaatctcaaacttatattggggtggtttgttgaggtaataatagagccttaaattcagttgtgcaatagccaggaatgtaaggaattcaaaattgttctttattttgtgccgccaataaatatcttttcataaaattagccagaaaagacgcggcatatagccctatttgcaccgatgatttcgcagcacgtgaggttaaaacttcctgattcatgtcacattttatggggagataatcgtaggctgacgacctttcagtcttctgtattagtcgtgtttacgagaattccctattaagcgaatgatgaaaagtagaacagtcgcaataagagcagggacttagtattgcactatctcctggaggtcaacagagggctattacatgcgcaacaggttaaagattgtgaatagttaccggcagtcatttacccgcttataacaagcgaggcagttgtaatgatagctcagaaggattatgcaaggcttcgtaagggagaacgcatataccacttctgtgcatactgttgagctgaaaaactgacgaattatgataaactccagccaactttatttcatatcattgagggcctgtggctgatggcacagctatatttctactattccgcaatgaatgcgggtaagtctacagcattgttgcaatcttcatacaattaccaggaacgcggcatgcgcactgtcgtatatacggcagaaattgatgatcgctttggtgccgggaaagtcagttcgcgtataggtttgtcatcgcctgcaaaattatttaaccaaaattcatcattatttgatgagattcgtgcggaacatgaacagcaggcaattcattgcgtactggttgatgaatgccagtttttaaccagacaacaagtatatgaattatcggaggttgtcgatcaactcgatatacccgtactttgttatggtttacgtaccgattttcgaggtgaattatttattggcagtcaatacttactggcgtggtccgacaaactggttgaattaaaaaccatctgtttttgtggccgtaaagcaagcatggtgctgcgtcttgatcaagcaggcagaccttataacgaaggtgagcaggtggttattggtggtaatgaacgctacgtttctgtatgccgtaaacactataaagaagcgttagaagtcggctcattaacggctattcaggaaaggcatcgccacgattaataagaatttctttactgacagggtgagcagggcgcttttatcctgtcagttcgttttacgcacttcttccgggctatacacccttctcggcagttttttaacgccgctatacgcctcacagagcgcttatacaccgacattgacttgtaacctgtaaagtacaatatcgctgtgtgtaggcgttatacatcgtcgcaaatatgatgaaggacaatgctgccggtttatggaaaagttgttttgggaaaacaaaaaacggccccagaaggggtaatgccagtcagttaagcaactgactggctctttttcggggctgtggggtatttccagggcctctcctttaccactctcgggaaggccctttcccttcttgtcggtaatttcactggttgtcccatacttgcaagatcgcgcatcagctccggtatacgtcccggggaagcgtatggcgtccgtcatcgacgtcagcagatggcagacttttcctttgcgcgtcacggtcagcaggcgggctgtcacctcatttcccagtcccggccacttttttcgtgcctgcgggctgatgttcagcttcaccagatgatcgcctttacccagttttctgatctcttcatattgcgctccctttctgagagggatcatccagtggcggtgttctcccgccaggctccaggtatttaacagtcctggtgagtaataacctttatccattaacgtcagagtgttatcgccggtttgttctataagttgctcagcaagctcattttcgctgttcttcatcgtgccgaaggctgcagtcgtcagcagatggctggtcagttccatctggcagaccattttgacctgcgggtagagcgccgagttcccggcatgtgtctggcgggggaaggctgcatcgttctctggtgtatccggtgtgcgccagaacacaccatcgatggccagcagggtcaggccgcaccagtgcggatgcggcgtggcgttatgccagagctgcgctgttttcgtgaacacgcggcggacagcctcaattcccagacgctggcgggtctgaataacggcactgggggcaacgaaggggcgattgcccggcagcatgatgtccaggcgattcgcaatctggtgaagaggttctttacgctcaagcgccatgccaacaatacaccagaccatcatttcgaggggaagacggcgcttgtgtagcgttacagtacctgattcggcaaggcaacgagagatgagttcgggggcgaggtaatcccccagagaagtcagtgggttacgcagagaatcgtaacgggataccaaatcaagggcctgtccaatgagcataaaaaaatccggaaacgagtgagcgtttccggattcttacacagccactggatcggtcaactgatccttaactgactggcattaccccttctggggccgtttatgttgccagacagcgctactgattaagcggattttttcgcttttttctcagctttagccggagcagcttctttcttcgctgcagtttcgccttctacataatcacgaccgtagtaggtatccagcagaatctgtttcagctcggagatcagcgggtaacgcgggttagcgccggtgcactggtcatcgaatgcatcttcagacagtttatccacgttcgccaggaagtctgcttcctgaacgccagcttcacggatagatttcggaatacccagttcagctttcagcgtttccagccatgccagcagtttctcgatcttagctgcagtacggtcgcccggtgcgctcagacccaggtggtcagcaatttcagcataacgacggcgagcctgcggacggtcatactggctgaatgcagtctgcttggtcgggttgtcattcgcgttgtagcgaataacgttacaaatcagcagggcgtttgccagaccgtgcggaatatggaactgggaacccagtttgtgcgccattgagtgacatacacccaggaaggcgttcgcaaacgcgatacccgcgatagtcgctgcactgtgaacacgttcacgcgctaccggatttttagacccttcgtggtaggacgctggcagatattctttcagcagtttcagtgcctgcagagcctgaccatcagagaactcagatgccagtacagaaacataagcttccatggcgtgagttactgcgtccagaccaccgaaagcacacagggacttcggcatgtccataaccaggttggcgtcgacaatcgccatatccggggtcagtgcatagtctgccagcggatatttctgaccagtagtgtcgtcagttacaaccgcaaacggagtgacttcagaacctgtaccagaagtggtggtgacagcgatcattttcgctttcacacccattttcgggaacttgtagatacgtttacggatatccataaagcgcagcgccagttcttcgaagtgagtttccggatgttcgtacataacccacatgatcttcgcagcgtccatcggggaacctccacccagcgcgataatcacgtctggtttgaaggagtttgccagttctgcacctttacgaacgatgctcagggtcgggtcagcttctacttcgaagaagacttcagtttcaacgcctgctgctttcaatacggaagtgatctgatcagcataaccattgttgaacaggaagcggtcagtcacgatgagcgcacgtttgtggccatcagtaatcacttcatccagcgcgattggcagggagccacggcggaagtagatagatttcggaagtttgtgccacaacatgttttcagctcgcttagcaacggttttcttgttgatcaggtgtttcggaccaacgttttcagagatggagttaccaccccaggaaccacaacccagagtcagggaaggtgcgagtttgaagttatacaggtcaccgataccaccctgagaagccggggtgttaatcaggatacgagccgttttcattttctgaccgaagtaagaaacgcgagccggttggttatcctggtcagtgtacaggcaagaggtatgaccgataccgcccatagcaaccagtttctctgctttttctaccgcgtcttcgaaatctttagcacggtacattgccagagtcggggacagtttttcatgtgcgaacggttcgctttcatcaacaacggtcacttcaccgatcagaatcttggtgttttctggtacagagaagcctgccagttcagcaattttataggctggctgaccaacgatagccgcgttcagcgcaccgtttttcaggataacgtcctgaacagctttcagctctttaccctgcaacagatagccgccgtgggttgcgaaacgttcacgtactgcgtcataaacagagtcaacaacaacaacagactgttcagaagcacagattacaccgttgtcgaaggttttggacatcagtacagatgcaactgcacgtttgatatcagcagtttcatcgataacaaccggagtgttgcccgcgcctacgccgatagctggtttaccggagctgtatgcggctttaaccatgcccggaccaccagtcgcgaggatcaggttgatgtctgggtggtgcatcagtgcgttagacagctcaacagaaggttgatcgatccagccgatcagatctttcggagcaccggcagcgatagcagcctgtagaacgatatcagccgctttgttggttgcatcttttgcacgcgggtgcggggagaagataatggcgttacgggtcttcaggctgatcagcgatttgaagatagcagttgaagtcgggttagtggtcggaacgataccgcaaataataccgatgggttcagcgatagtgatggtaccaaaagtgtcgtcttcagacagaacaccacaggttttttcatctttataagcgttgtagatatattcagaagcaaagtggtttttgatcactttatcttcgacgatacccatgccggattcggcaacggccattttcgcgagtgggattcgagcatctgcagcagccagagcggcggcgcggaagattttgtctacttgctcttgagtgaaactggcatattcacgctgggctttttttacacgctctacgagtgcgttaagttcagcgacattagtaacagccataatgctctcctgataatgttaaacttttttagtaaatcatctgctcgaatacgagagtatagtcagtgcggtgatgatttgcttaaccgatggaaatcaaaagattactcgcgctcacactcactgtgatttactaaaagagtttaaacattagagttattatctctaatgcgtcacttccaggtggcgtaagcaagattactcacttctgggtactgattacgtgatccaaatcaaatttttgcaaagctgacacctttcagcatggcttttcgccattatagctaacagttaataaattgtagtatgatttgttggctacattagcatgttttgcacaactagataacaataacgaatgatagcaattttaagtagttaggaggtgaaaaatgctgtcaaaaggcgtattgtcagcgcgtcttttcaaccttatttatggctaacattatccggcttttgcttcggagctaaccgtgattcagaccctttttgattttcccgtttacttcaaatttttcatcgggttatttgcgctggtcaacccggtagggattattcccgtctttatcagcatgaccagttatcagacagcggcagcgcgaaacaaaactaaccttacagccaacctgtctgtggccattatcttgtggatctcgctttttctcggcgacacgattctacaactttttggtatatcaattgattcattccgtatcgccggtggcatcctggtggtgacaatagcgatgtcgatgatcagcggcaagcttggtgaggataaacagaacaagcaagaaaaatcagaaaccgcggtacgtgaaagcattggtgtggtgccattggcgttgccgttgatggcggggccaggggcgatcagttctaccatcgtctggggtacgcgttatcacagcattagctatctgtttggtttctttgtggctattgcattgttcgctttatgttgctggggattgttccgcatggcaccgtggctggtacgagttttacgccagaccggcatcaacgtgattacgcgtattatggggctattgctgatggcattggggattgaatttatcgttactggtattaaggggattttccccggcctgcttaattaattcctttcaaatgaaacggagctgtcatgctccgtttacttcgtcattatttttactttgttcctgcgcagttatcaaaagcaaaaggaataggtaaaaatattcttctcaaattacagttagttataaggatttccttaactgcttctcctcaccatcatgttattttcgccacatcataatcctgggcttgctgaagaataattgaaatgatattagtaattccactgcctttggtagaggaaagtgctaaataataatcaattgttaaattattgtgcatttcactactggaactgtaatcagaaaagagagacatgcttaaccaacctctatttgattgaattgaaagatgtttgttaaggcatggatgcaagctatagattctggttcggtcaataaaagagaattgcttaacaattttgcaaaatgtattggcgagtaagaaccgcatttggtactttccgggcaaccgccaggcgattctttattggtaatgagaataattaacaattaaagatcgtcgcgaaagaataatgtgtctcgacaggggagacacagtacgaatcgacataaggtgatcgtctgaatcaccagaataaataaagtcggtgatagtaatacgtaacgataaagtaacctgacagcagaaagtctccgagcctgtgcagggtcccaatccgggattacacatgctggttaataccagtaattataatgagggagtccaaaaaacaatgaccaacatcaccaagagaagtttagtagcagctggcgttttggctgcgcttatggcagggaatgtcgcgctggcagctgatgtacccgcaggtgtcacactggcggaaaaacaaacgctggtacgtaacaatggttcagaagttcagtcattagatccgcacaaaattgaaggtgttccggagtctaatatcagccgagacctgtttgaaggcttactggttagcgatcttgacggccatccggcacctggcgtcgctgaatcctgggataataaagacgcgaaagtctggaccttccatttgcgtaaagatgcgaaatggtctgatggcacgccagtcacagcacaagactttgtgtatagctggcaacgttctgttgatccaaacactgcttctccgtatgccagttatctgcaatatgggcatatcgccggtattgatgaaattcttgatgggaaaaaaccgattaccgatctcggcgtgaaagctattgatgatcacacattagaagtcaccttaagtgaacctgttccgtacttctataaattacttgttcacccatcaacttcaccggtgccaaaagccgctatcgagaaattcggcgaaaaatggacccagcctggtaatatcgtcaccaacggtgcctataccttaaaagattgggtcgtaaacgaacgaatcgttcttgaacgcagcccgacctactggaacaacgcgaaaaccgttattaaccaggtaacctatttgcctattgcttctgaagttaccgatgtcaaccgctaccgtagtggtgaaatcgacatgacttataacaacatgccgatcgaattgttccagaagctgaaaaaagagatcccggacgaagttcacgttgatccatacctgtgcacttactattacgaaattaacaaccagaaaccgccatttaatgacgtgcgtgtgcgtaccgcactgaaactgggtatggaccgcgatatcattgttaataaagtgaaagcgcagggcgacatgcccgcctatggttacactccaccatatactgatggcgcaaaattgactcagccggaatggtttggctggagccaggaaaaacgtaacgaagaagcgaaaaaactgctggctgaagcgggttataccgcagacaaaccgttgaccatcaacctgttgtataacacctccgatctgcataaaaagctggcgattgctgcctcttcattgtggaagaaaaacattggtgtaaacgtcaaactggttaaccaggagtggaaaacgttcctcgacacccgtcaccagggcacttttgatgtggcccgtgcaggctggtgtgcagactacaacgaaccaacttccttcctgaacaccatgctgtcgaacagctcaatgaataccgcgcattataagagcccggcctttgacagcattatggcggaaacgctgaaagtgactgacgaggcgcagcgtacagctctgtacactaaagcagaacaacagctggataaggattcggccattgttcctgtttattactacgtgaatgcgcgtttggtgaaaccgtgggttggtggctataccggcaaagatccgctggataatatctacacccggaatatgtacattgtgaagcactaatggcaatacgtggggcaggagtgtcctgctccacggtgtctgatttttatcgcattacagaaggcacaggccagaaggtagggcaatgttaaaatttattctacgtcgctgtctggaagcgattccgacgctatttattcttattactatttcgttctttatgatgcgcctcgcgccgggcagtccttttaccggcgaacgtactttaccaccggaagtgatggccaatatcgaagcgaaatatcatcttaatgatccgatcatgacacagtatttcagctacctgaaacaactggcgcatggcgatttcggtccatcgtttaagtataaagattattcggtcaatgacctggttgcatccagttttcccgtttctgccaaactgggagccgcagcattttttcttgcggtaatactgggtgttagtgctggcgttattgccgcattaaagcaaaacaccaaatgggactataccgtgatggggctggcaatgaccggggttgttatccccagttttgtggttgcgccattattagtcatgatatttgcgatcattttgcattggctgccgggcggtggctggaatggtggagcgcttaaattcatgatattgccaatggtggcgttatcactcgcctatatcgccagtattgcgcgtattacccgtggctctatgattgaggttttacactccaactttattcgtactgcccgggcgaaagggttacctatgcggcggatcattttacgccacgcattaaaacctgctctgttacccgtgctctcctatatggggcccgcatttgtcggcattattaccggttcgatggtcatcgaaaccatttatggtttaccggggattgggcaattgttcgttaatggcgcattgaaccgtgactattccttagtgttaagtctgaccattctggttggcgcgttaaccattttgtttaatgccattgtcgatgtgctatatgcggttatcgacccgaaaatccgttactgatactggagctcgcgatgatgttaagtaagaaaaacagcgagacgctggaaaatttcagtgaaaagctggaggtcgaagggcgcagcttgtggcaggacgcacgtcgacgttttatgcataaccgtgcggcggttgccagtctgatagtgctggtgctgatcgcgttatttgtaatcttggcaccgatgctttcgcagtttgcctatgacgatactgactgggcgatgatgtccagcgccccggatatggagtccggtcactactttggtactgactcatccggtcgcgacctgcttgtgcgcgttgcgattggcgggcgtatctcactcatggtcggtgttgctgcggcactggtggcagtggtcgtggggacactttatggttcgctttccggttatctgggcggtaaagtggattcggtaatgatgcgtctgctggaaatcctcaactccttcccattcatgttcttcgtcattttgctggtgacctttttcggtcaaaacatcctgctgattttcgtggcgattggcatggtttcctggctggatatggctcgtattgtgcgtgggcaaaccctgagtctgaagcgcaaagagtttattgaggcggcacaagttggcggtgtatcgacgccgggcattgttattcgccacattgtgccgaacgtactcggtgtggtggtggtctatgcgtcgcttctggtgcccagcatgatcctctttgaatctttccttagcttcctgggattaggtacgcaagagccgttaagcagctggggtgcattgctgagtgatggcgcgaactcgatggaagtctctccatggttactgttgttccctgcgggattcctcgtggtaacgctgttttgtttcaactttatcggcgatggcttgcgtgatgccctcgacccgaaagatcgttaaggagtgcagccatgagcgtaattgaaactgcaactgtgccgctcgcacaacaacaggctgacgcactgctgaacgtgaaagatttgcgtgtcacctttagtaccccggatggcgacgtcacggcggtcaatgatttgaatttttcgctacgtgccggagaaacgctgggcatcgtaggtgagtctggttcgggcaaatcgcaaaccgcatttgcgttgatgggcctgttggctgccaacggacgtattggcggatcggcaaccttcaatgggcgtgaaatcctcaatttgccagagcgtgaactcaataaactgcgagctgaacaaatctcaatgatttttcaggacccaatgacttcgttgaatccctatatgcgcgtcggtgagcagttgatggaagtgctgatgctgcataagaatatgagcaaagctgaggcgtttgaagaatcggtgcggatgctcgatgcggtaaaaatgccggaagcgcgtaaacgcatgaaaatgtacccgcacgaattttctggcggcatgcgtcagcgagtcatgattgcgatggcattgctatgtcgacctaagctgctgattgcggatgaacccactactgcgctggacgtcaccgtacaggcgcagatcatgacgctattgaatgaactgaagcgggaatttaataccgccatcattatgattacccacgatcttggcgtggtggcggggatctgcgacaaagtgctggtaatgtacgccgggcgcacgatggaatatggcaacgcgcgcgatgtcttttatcaacccgtacatccttattctatcggtttgctcaacgcggtgccgcgtctcgatgcggaaggtgaaacaatgttgactattccgggtaatccgccaaacctgctgcgattaccgaaaggttgcccgttccagccacgttgtccgcatgcgatggaaatttgtagtagcgcaccgccgctggaagagtttacgcctggccgtctgcgtgcttgctttaaaccagtggaggaactgttatgaatgctgtaaccgaaggaagaaaagtcctcctcgaaatcgccgatctgaaagtgcactttgaaatcaaagatggcaaacagtggttctggcaaccgccgaaaacgctcaaagccgtcgatggtgtaactcttcgcctgtatgaaggggaaacattaggtgtggtaggggaatcgggatgcgggaagtccacctttgctcgcgccatcattggcttggttaaagcgaccgacggtcatgtggcctggttaggtaaagagttgctgggcatgaagcccgatgaatggcgtgccgtacgcagtgatattcagatgattttccaggatccgttggcatcactgaacccgcgtatgaccatcggcgagatcatcgctgaaccactgcgtacttatcatccgaaaatgtcacgccaggaagttcgtgagcgcgtgaaggcgatgatgctgaaagtcggtttgttgcctaatctgattaaccgctatccgcatgagttctccggtgggcagtgccagcgtatcgggattgctcgtgctcttattcttgaaccgaagctgattatctgtgatgagccggtgtcggcgctggacgtgtcaattcaggcgcaggtggtcaacctgctccagcagttgcaacgtgagatgggattgtcattaatttttatcgctcacgacctggccgtggtaaaacacatttccgatcgtgtgctggtgatgtatctcggccatgcggtagaactggggacctatgatgaggtctaccacaatccgctacatccttacaccagggcattgatgtcggcagtccccatacctgatccggatctggagaagaacaaaaccatccagttactggaaggggaattaccgtcgccgatcaacccgccttccggttgtgttttccgtacccgttgtccgattgccggtccggagtgcgccaaaacacgtcctgtgctggaagggagtttcagacacgccgtttcttgcctgaaagtcgatccgctttaaaagcaataagggctgacagttgtcagcccttattcacgccaaaagcgattatttattcccgccagatgatatggcaaagtttgtgatctttttcgcggcataacagaatgcgcgcgaaaacatcgttgatttcaccatcttcactgtccgccagaccaatcaccacttcggcaaaaaagtccgggttcaaatcgaaatcaacatgttcctgccagtcttccgccggatcgaataactccgcgccgccgcgctcttcaaactgaagattgaacagcagaacatcagctggatcgagattgtcggcagccagttcgagaaaaatatcgtaggcctgctcaagcgtttcatcttcagtcaggcgattgtttagatccatatccatagtcactacctgtttaacctctgttggcgacgttttacagcaacgggctgaagaagtaaaacagtcgctcggcgacacgttgccataatggacgttttagccataaacgggcatcgagcagacgagaacgcgaaatataatcgtcctgaacggcggcgaggtctgcaccaaaacctttatcgtcgattgccagggtaatctcgaaatttagccacagactacgcatatcaaggttaacggtgccaaccagacttagttcaccatcgaccagcacgctcttggtatgcagtaacccgccttcaaactgataaattttaaccccagcagccagcagttctgtaaagaatgcgcgactggcccagccgaccagcatcgagtcattttttcgcggaaggataatactgacatccaccccgcgctgcgccgccgtgcaaatcgcatgaagtaaatcatcgcttggcacaaaatagggcgttgtcatgatcaaatattcacgagccgaataagcagcagtcaataatgcctggtgaatgagatcttccggaaagccggggccagaagcaattgtgtgaatggtgtgaccgctggcctgctcaaacggcataatattgacatctggtggcggcggcagaatacgtttcccggtttcaatctcccagtcgcaggaataaataatccccatcgcggtggcgatggggccttccatacgcgccatcagatcaatccattgccctacgcccgcatcttgtttgaagtagcgagggtcgaccatattcatgctgccggtgtacgcgatgtaattatcgatcatgatcatcttgcgatgttggcgcaggtccatacggcgtaaaaacacacgcatcagattgacctttaaggcttcgacaacttcaataccggcattacgcattagctcgggccacgggctgcggaaaaaagccacactcccggcggagtcgagcatcaatcggcaatgaataccacgccgtgcagcggccattaatgattcagccacctggtccgccatgccgccgggctgccagatataaaacaccatctcaatattatggcgcgcgagctggatgtcgcggattaacgcctgcatcacatcatctgactcggtcatcagttgtagctgattccctttgaccccagcgatcccctgacgacgctcgcaaagcttgaataatggcgcagcgacactgctattttcttcggcgaagatatgcttacaggctttaaggtcgttaagccattttgcggtggaaggccacatcgctctggcgcgctcagcgcggcgtttgcctaaatggagctcgccaacggcaagataggcaataattccgactaacggcagaatgtaaataatcaacagccaggccatcgcggagggaactgcgcgtcgtttcattagaatgcgtaaagttacgcctgcaatgagcaaccagtatcccagaatggccaaccaactcaccaacgtataaacggttgtcatagattagaaatccttttgaaagcgcattgttatgagtttacgcatatggattcatctggcaaataaaaacgcgggaaaagcactggtcagcgtcaggggcgggggtataatgaccattctgttgttgcatagagtagttaacatgaagcggagtagaacggaagtggggcgctggcgcatgcagcgtcaggctagccgacgtaaatcgcgttggcttgaggggcagtcgcgccgaaatatgcgtatccacagcatcaggaagtgcattctaaacaaacagcgtaactcgttattgtttgcgatctacaatatctaaatgtactgggcaccattgcggtgcccaataagtttactcttccgtctttaaactctatttttgcgccgattctttactgtcagctttcgtttcttgttcatcgttatcgctgaaaatgccatgaccggagttcaacaacattgaaacgagcatatcattattaatctcttcaccatttaaaactcgcgccagaatttcgctgccaaacagttgtggtgagaggatgatatccggatgtaccatcttaatcttattcaggtttttgctatcactgacggcgagaactgttttgacatcactgctcatatcttttgccgagagtacaacaaacgcgttatctgcatcgttatcactcagcgccagaatggcccggcaacgatcgattcccgctttctttaacactgaactgtcattactgtcaccggggataacatcggcgttatcgcctaagcgttgctcaagttgcttgatatcatcttcaggcaagttgctgataaccgttacgttttgtccgcgttgattcagttgcagaatcgtattgatggcgagaatcgaatgtccgcaaacaataaaatgatctttacgatgcattgtatgattgtttccttttacaagtttgttgaatcccccgcggataagcggaccaaaaattgaggtcatagatgtggcaaaaacggtaatgccggaaataatgaccgaaatagtgaacaatcgtgctgattcagaaacagggacaatatcgccatagccgacggttgacatggtttctatcgaaaaatagaacgcggtcatcaaactttctattcgcggattaaaaccttcgcttaaataaagcgcaccgtaagtggagtaaaacagtaacgtcgtgaaactaataaatgcgaaaattgtcccggctgctgcgctactgtgggagaagtctttgcgcagtatcagcaaaaacaccagcgtaaaaatgcaaaatccaatactaaatttcagccagggataaaaatgcagagtgtaaattagcgctatcaacaacaaaatgatactgattgcccatgcgagctttgcccggaacagtaagccaatggagttcaggacaagaaatacgccgagcataaatagtggggcgtttgccagcaaggagagatccagctctgaaaatgctttgatatggaaaatatcaagcaaattgaccgacataccatagattgttttaaaaataagcaatccatttaaaaagacggccagcgcgagaatgtcgtgccgtagggtcacccataactttgttgctgtttgtttgaatgtagtccagtgactcactgatacctctgtaaccacaattttgtttaattatctcaacgtgcacattttctgaacatacatgcagcgcgtgaatgtgttaaacaatagtagatgactttatccgcagtaatcaaaggttttgagtgagcaactctgcgtcaggaaagggcattttcctgaatatgttcacatcatataaagaaatacagataaagttattatctgcttgtggtggtgaatgcactgaccgacctataaggaaaggccaaacaagaacacggttgcaaaaaccgtgcccttaaatattgaatttctattcagaacactttcttaaatggtttcactgaaacgtgttcatagactcctgccgctacgtacgggtcagcatcggcccaagcctgagctgcttccagcgactcaaattcagcaataacggttgagccagtaaatcccgcagcccctggatcgttactgtctaccgctggcattggaccggcggtcaacaaacgaccttcatcatgcagtaactgtaaacgtgctaaatgtgccggacgaacggaaaggcgtttttcgaggctatcagctttgtcttgagcgtaaataacatacaacacaggcacaactccttgttcgggaaagttgtaaagtacgttatttgaaagggcgaagatctgcaacggaaagatgatgtctttgttaagaccatgcataaagtaaggtcaattacgccaaaaatgacattttcactgatcctgatcgtcttgccttattgaatatgattgctatttgcatttaaaatcggggcctggtttttctactgaaatgattatgacttcaatgacccttgatttacctcgccgcttcccctggccgacgttactttcggtctgcattcatggtgctgttgtggcgggtttgctctatacctcggtacatcaggttattgaactacctgcgcctgcgcagccgatttctgtcacgatggttgcgcctgctgatcttgaaccgccacaagccgttcagccaccaccggagccggtggtagagccagaaccggaacctgagccgatccctgaaccgccaaaagaagctccggtggtcattgaaaagccgaagccgaaacctaagccaaaaccgaagccggtgaaaaaggtggagcagccaaaacgcgatgtcaaacccgtagagtcgcgtccggcatcaccgtttgaaaatacggcacccgcgcgcccgacatcaagtacggcaacggctgcaaccagcaagccggttaccagtgtggcttcaggaccacgcgcattaagccgtaatcagccgcagtatccggcacgagcacaggcattgcgcattgaagggcaggttaaagttaaatttgatgtcacgccagatggtcgcgtggataacgtacaaatcctctcagccaagcctgcaaacatgtttgagcgtgaggtgaaaaatgcgatgcgcagatggcgttatgagccgggtaagccaggcagtgggattgtggtgaatatcctgtttaaaattaacggcactaccgaaattcagtaagcataaagtcaaaagcctccgaccggaggcttttgattattactcaacgggtaaggcgcgaggttttccttcgggatcaaccgcgacatacttaaataatgcttctgttgctttatagcgttgcccgattggttcagacgccacttttttcacccacacttcaatattaatgctgactgatgtcgtccctttctggacacagcgtgcatagcagcacaccacatcgccgaccgcaaccggccgtaagaaagtcattccttcaacccgcacggtcactacacgaccatgggcaatttctttcgccagaatagcgccgccaatatccatttgtgacattaaccaaccaccaaagatgtcaccattggcattggtatcggcgggcatggctaaagtacgtaaaacaagatcgccctgagggacgttatgtgttgtagacatggtaaaaccgacttaaaaggaaaatcacaggcgcgatgctactatgattttcctgaggagaacagaggagatacagcgccagccccgagggactggcagtctggttaggatttatcttcctgcggcatgtggcggtagatatagataccgcttaacaatgtgaagattaaggtaagggcggtcaggccaaagactttaaagttgacccaaatattttgcggcagccagaatgcgatgtagatgtttgccaggccgcaaaggataaagaaaacagcccaggccagattcagcttcgaccataccgattgcggcagggtgagttctttacccagcatccgctgaattagcggctttttcatcacccattggctgactaacagggcacccgcaaacagggcataaatgacagtaaccttccatttaataaactcatcattgtggaagaacagcgttaagccaccgaagacgaccaccagaacaaaagtgatcagggccatcttctcaaccttacgaaagcgaacccagctatatataagcacaatcgccgtggcgacgatgagcgccgcagtagccgcatagatgtcataaatcttgtaaaacgcgaaaaagacaaccagcggtaaaaaatcaagaaactgcttcattttacgattccgtaatcaaatgcttaaggttattggcgaatcaacatatacaggcggaacagatagatgagcaatacggctgaaatcaggttgctcaaggtgttcgccagtacggcaccaatttccggggttaatgcggcaaaagaagaggcaaaaagcagcaacagtgtttttgccagcaaccagctcagtactgcgggtgccaccagacgcatattcgcccatgtcagccgcatactgctacgcatcgaggcaaaaacgcccattttgtcctgtaccagcatcaccggtgccagagccagtaaaatggccatgataattcccggaacgaccaccagcatgatgccaatctgtactaaaagggtagtcagaaaaatcagaataaataactttggcaatatcggcgcactggcaccaatagctcgcagcgcactgactctctgacccgcagacaccagctggataattaatattacgcccccggcgagaatggcgttaccgattaatcctgaaaaagtggacgccgctgaagcctgcagcaaaatttgttgctgttccggtgacatattctgaaccaggtcgaacaacccactactgccgctaacgggtacgccgtcattgagctgcgcaagctgtgcatcactgggtgagaaaacatgccctaacaccactgtgataaacgcacatagcaacgatatcaacagaatggtcataaattgattacggaagaaatttccggtgtcacggtatacggactgcgccgtgatagacatgcactctccttgagttttatgcaggtgttaattagcgggcaattgtaccctggttaagccccgggtggcagcatcaggtcttgtatggaaaagcatatctttgtaaagcggaggtaattgctggccttcaggcgtgggtaaaccgctgcaagtggcgagcgagttaatatttgcgtagcgaaaatatttaaaaattgatttaaatcacattaaccaggattttcaatgcaacttctaaattaatccagatcaataaatggtgaattaccatatgtaatgtgatctgtgtaggatcatttgttaccccaatgtgggtatattcgtcacgtttttataaccataacgacggagcggatatgaaaaagttaacagtggcggctttggcagtagcaactcttctctctggcagtgcctttgcgcatgaagccggcgaattttttatgcgtgcaggttctgcaaccgtacgtccaacagaaggtgctggtggtacgttaggaagtctgggtggattcagcgtgaccaataacactcaactgggcctgacgtttacttatatggcgaccgacaacattggtgtggaattactggcagcaacgccgttccgccataaaatcggcacccgggcgaccggcgatattgcaaccgttcatcatctgccgccaacactgatggcgcagtggtattttggtgatgccagcagcaaattccgtccttacgttggtgcaggtattaactacaccaccttctttgataatggatttaacgatcatggcaaagaggcggggctttccgatctcagtctgaaagactcctggggagctgccgggcaggtgggggttgattatctgattaaccgtgactggttggttaacatgtcagtctggtacatggatattgataccactgccaattataaactgggcggtgcacagcaacacgatagcgtacgcctcgatccgtgggtgtttatgttctcagcaggatatcgtttttaattccgcacaaaaatgaccccgtaattacggggtcaataaggacatggtataaagggtattatttcttcgcttctacgccatcagtttcagagcgaattaagaatttctcagttgtttgcggaatatgctgaattagccagtcggccatgtgcttttcctcatttaaaatcgcttcgatggttggaattgaagctgtatcaccggcattttttgctgctgctaagagtgaggtataacaggcgatttcaaattgctcgaagacatatccgctaatagagcctttgactatttcatcagaagggaatataccaccgattgactgcccaagtgcagccattttactcatggaatctttaatgactgaacgtgaaatgtcattacgatcaagaatagtttccagttgaacaatctggtttttggtttcactaagatgttgttcaatacgagcgcgtagttcaggataattatctatacgactggccatggattcaagcattgattcggcttgcttttccattgcgtgggcgtcacgtaaccagtcatgataatgttcaatacgattcatgaaaatgtcctctttataaaatgactaaaagttaaagttcatatttcaggctttattttcggctttcttatttacgttattaagggccagatcagtcaatttgatgtcggtggccttttcttcttccagggtatctttcagaagcttcgctgctttacgataacctaattgttcagccagcgtcgctaatgtcccgtaactggcaatctcataatgctcgactttctgtgctgcggcaatcagtgcggcatcacgcacttcgtttttctcggtactttcgatgacctcatcagcttcttcaataagaccttccattgccacacatttcatgcgcttaattttcagattcgattctgattccacaatttgatcaatacgttcaatctgtccatgtgtttcctcgaggtgcgcatgaaaagcctgacttaatttttcgtttgatgttgctcttgcgagttttgccagcgcccgggttaattgtttttctgcgctgtatgtatctgaaagcaggtgaatagtttcattaatatgagtgttgtgtgtcgacactcattaaaattagttgttaatgagaattagtcaaattaagcgtaacgagaagaaagtggaaaaatatattttgaggaacgttctggatgtattaacaattgcctgaggaataagtgacttagagaaaattattgattttactggtgttatgttgcgagattaatttgtttgattatattactgttgggcggaaaaaagacgtaagttgacgttcgacaggggtaagcgaaacggtaaaaagataaataataaatgaatttaggatttttccggcttcgttaaagaaagttaaaatgccgccagcggaactggcggctgcggaattaactgcgcgtcgccgctttcatcggttgtacaaaagctttcagtgccgccagcattttctctggctcattaatatgttgctcgatgattttaacgatggccgaaccagaaatcgcgcccgcagctcctgcatcaatcgcggcttttacctgatccggggcggaaataccaaatccctgcaatggaggcgcagcgttgtactctttcagcttcgcaaccagatgattgaggggtaacgcggcgcggttttctgcgccggtcacgcccgctcgcgacagcaaataggtgtaaccacgaccgtaagaggctatctggcgcagcaaatcatcgtcggcattcggcgggcaaataaagataggtgcgacattatgacgcaacgcggcctggcggaagggcgcggactcttccacgggcacatcggcaaccagcaccgaatcgacgccgactttctcgcactcggcataaaactcatcaatgcctttgttaaacaccaggttggcatacatcaaaaggccgatgggaatggtcgggtgcttctggcgaatgagtgccagcatctcaaagcactgcgccggggttactcccgccgcaaaagcacgcagtgtggcgttttgaatcgtcgggccatccgccagtgggtcggagaaggggatgcctaactccagcgcgtcagcaccggcttcaattagcgtatcgataattttcaacgactgctcaatgcccggatcaccgagggtgacgaaaggaacgaatgcgccttctttgcgctccttcaactgggcaaacagagattcgtagcgttccatcagatttcccctcgtgctttcaaaatatcgtgaacggtgaagatgtctttatcgccgcgaccggaaaggttaaccaccagtagctgctctttttccggattttcgcgcatcattttcagcgcatgggccagggcgtgggaggattccagcgccgggatgatcccttcatgcaggcaaagcgttttaaaggcttccagggcttcatcgtcggtaatagacacgtaatcagcgcgtccagtgctgttgagatacgcatgttgcgggccgacggacgggaaatccagcccggcagaaatggagtaagactcttcaatttgcccgtcttcggtttgcatcatcggcgctttcataccgaaatagatgcccacgcgaccatgttttaacggtgcgccgtgctcgccagtttcgataccgtggccgccaggctccacaccaatcaggccgacgtcggtttcgttgatgaaatctgcaaacataccgatggcattcgaaccaccgccaacacaggcgataacggcatccggcaggcgaccttctctttccagaatctgcgctttcgtttcttcgccaatcatccgctgaaactcacgcacaatggtcgggtaaggatgcgggccagctgcggtacccagcatatagtgcgcggtttcataactgccggaccagtcgcgtagcgcctcattacaggcatctttcagggtcgcggaaccgctatgtaccgggatcacttccgcacccattaagcgcatccggaaaacgttgggcgactggcgttcaacgtctttggcacccatataaattcggcatttcaggccgagcagggcgctggcaagggccgacgccacgccatgctgaccggcaccggtttcggcaataatttcagttttacccatccgcttcgccagtaaagcctgaccgagcacctggttagttttatgcgcgccgccgtgcagcaaatcttcgcgcttcagatacagcgtggtgttcgtcccggctgtaatgttctggcatttggtcagcgcggttggacgcccggcatagtttttcagcaggtcgttgaactgagcctgaaattcaggatctttttgcgcgctgacaaaagcttcttccagctggcgcagagcaggcatcaggatttgtggcacgtacatgccgccaaactcaccaaaataggggttaagtaatgttgtcattgttcctttccttaatatgcgcgcagcgtctggaaaaccgaggccaaaagacgtgcgtctttgatacccggttgcgactctacagcagaattaaaatcaagcccggcgcagccggtttgtgccgcttccacgcagttatctgcgcctaagccccccgccagcagaacgttgccaagcgattgaccatttaatagtgaccagtcgaaacgttgtccgctcccgccctgaccgttgtcgaatacatatttatcgatgtgctgaaaatcgcgcgcgggaagagtttcaccgacacttaaagccttccagatggcgacgtgtgctggcagagcctcacgcagattgtcgatatacagctgatcttcattaccatgcagttgcactgccgccagcgataacaccttagctttgtccgccacatcggcaatatcgtgattgcggaacacgccaacatactgcaacggtgctgcagccatcacttcctgcgcctgttcaacgttgacgcaacgcggtgatgtcgcaacaaaaatcaacccaccgtaaatcgcgcccgcgtcataagctgctttagcatcttgcccacgtgtcaggccacatactttattctcacccagcaacacccgacgcacggcggcgttcaaatcgtcatgggccatcaacgccgaaccaatcagaaagccgttagcgaagtggcttaactcgcgcacctgagcgtaagtattgatgccggattcgctgattaccgtcacgttgtgccccagtttcggcgcaagctcgcgggtacggttgagatcaatcgacaaatcgcgcagatcgcggttgttgatgccaacgacctttgcccccaatgcaatggcgcgctccagttcctcttcattactgacttcggtcagcacacccatctccagactgtgggcgacggctgcaagctggcgatattgttcgtcatccagtactgaaagcattaataagcaggcatcggcctggtaatagcgcgccagatagatctggtaaggatcgataatgaagtctttacataaaatcggctgcggggcgatttggctgacgatggggaggaaatcaaagctcccctgaaaatatttctcatcagtcagcactgaaattgccgaagcgtaatgtttataaatggcggcaatgcgtgccggatcgaaatcatcacggatcacgccttttgacggcgacgcttttttacactccagaataaacgccgtgcgtgcgccctgaagtgcatcataaaaatgtcgcgtgctcggctgaacctcattctgaaaactggccagcggttgctgctctttgcgggtttctacccaaatcgccttgtctgcgacgattttcgctaaaacggtttgcatcatttaccctcgtgccgccagtgcggtgactctgtcgtaagcggaaccactgcgcagtacctcaagaacggtttgcgcattggcttgcagatcttcatggccatgcaggcgcattaacatggcgacattcgccgcgacggctgcttcatgggcggcgtcgcctttaccttgtaacaagcgtgttaaaatgtcacggttttcttccggtgttccgcctgccaattgctcctggtggtagggtgtcaggccaaaatcttcagcggtcaattgatagctcttaatttcgccgtcatgtagttcggcaacgattgtcggcgcgtgtaatgaaacttcatccatcccgccgctgtgcaccactgccgcgcgttgataccccagcacgcgcaaggtttcggcaatcggcagcaccagttccggactataaacaccaattagcgccagcggcggatgcgccgggttaatcaatggtcccagcacgttgaacagagtgcgggttttcagttgctggcgaaccggcatcgcatggcggaatccggtgtgatacttcggcgcaaagaggaaacagacgcctaactcatccagcgcctggcgcgatttatcggcgttcatatcaagattaataccgaacgccgccagcagatccgacgagccggatttactggagacgctacggttgccgtgtttcgccactttcagcccgcaggccgcggcgacaaacgcactggcggtagaaatattgatgctgttgctgccgtcaccgccagtaccgacgatatcggcaaacagataatccgggcgcgggaatggcgcggcgttttccagtagcgcggttgctgccccggcgatctcgttcgggtgttcaccgcgaattttcatgctcaccagcgccgccgccagttgttccggcttcagctcgccacgtaccaccgctgaaaacagctggtggctttcttgttggctaagcgtctgtgcctgatacagtttttccagaatcggttgcagcgtgttggttggctctagtttctgctgcgcccaggccagcgtttgttccagcaggcgagcgccctgggtagtaagaatggattccggatggaactggaatccacaaacgcgatctgcatcgtgacgcaccgccatcaccatgccattaaaatgggcgttgatggttaaaccggccggaatgttactgccaaccagcgagtgataacgcgccactggcagcgggtttgttaatccggcaaacatcgcctgaccgtcatgttcaatgctcgacgctttaccgtgaagaatttcgcccgcctgaccgacatagcccccgtaagcttcgacaatcgcctgatgtccgaggcaaatgccaataattggcagcttgccacgcaagcgggtgaggagttccggcatacaaccggcttcgctcggcacaccggggccaggagaaagcatcagcaccggattgctcatcgtcgccaggcgttcaattaaggtctgcgccggaatatggttgcggtaaatcaccacgttatgaccattgctgcgcaactgatctgccaggttgtacgtaaaagagtcgatattatcgagcagcagaatgtcagccattagaacgtctcctgtgcatgatgcgcggtggcaatagcgcgcagtacagcgcgggctttattacgagtttcgtcggcttccgactgcggaacagaatcaaggactacgccagcaccggcttgcacggtggcgataccgttttccaccagcgccgagcggatcacaatgcaggtgtcgagatcgccatgcgcggtaaaataacctaccgcgccgccgtagctgccgcgtcgacgaccttctgcttcggcaattaactgcatagcgcgtactttcggtgcaccgcttaacgtccccatattcatacaggcgcggtaagcgtgcagggcgtcgagatcgtggcgcagctcaccaacaacgcgggagactaggtgcatcacgtaagagtaacggtcaactttggtgagatcggcgacgtagcggctgccgggtgtgcaaatgcgtgccaggtcattacgggcgagatccaccagcatcagatgttcagaaagctctttatgatcggtacgcatctccagttcgatgcggctgtcgaggtctctgtccagcgaaccatcggcacgacgaccgcgtggacgtgttccggcaatcgggtaaatctcaatctggcggctggtggcgtcatacttgagcgaactttccggcgacgcgccaaacagggtgaaatcattatcctgcataaaaaacatgtacgggctgggattactctttttcagcacgtaataggctgccagcggtgacgggcagggcagagagaaacggcgagatggcaccacctggaaaatttctccggcgcgaatcgctttttgcaacaaacgcactacaccaccgaactcttcatcgctctggttacattcacaacgcatatgcggcacggaaaccaccggcagcggcggcgcggcttcggtcagttgctgacgtagttcgttcaggcgagcagtgagacgttgtttttcttcttcattcggagcaaacaggctggcctgaatacgagtgctttttttctgatggtcaatcaccatcagcgtttcagcgagataaaaacagaaatcagggcagctattttccgctgacagttgcggtaaattttcaaatcccgccacaaggtcataagagaacaggccgccgaagaacattgcttctcgttcttccttcggtacattcaacagattctgtaataagcggaaagcgtcaaaaaccgaaagggagcataagcgggcgtcttcatccagcagtggactgacaggcgggaagcgcagtacgcggcagtttggtgattgttcattttccacacccgcaggcaaggcgttatccagtagtgtcaacagggcttctccattgccggaaagcgcctggattgtgacagtgtcacttaatgctgtaatgcgcagcgcactgtctaccagcagcaggctttttaaatcatctttgctgtcgatatctgcggattccagcagcagcgttgccggacgatccccacacaactggtgaaaaagcgcagtcgggttgtcgcgataagcgccttcgcaggttagcagttcgagagtcggtttttgtgtttgcattgttattctctaattttgttcaaaaaaaagcccgctcattaggcgggctgggtatctgattgctttacgcatggtgaatacactgcccgtttcaggaagtgcgccaccaacctttcagtacgaaaattgctttcattgtcgataccctttttacgtgaacttgcgtactagttaactagttcgatgattaattgtcaacagctcatttcagaatatttgccagaaccgttatgatgtcggcgcaaaaaatattatccagaacgggagtgcgccttgagcgacacgaattacgcagtgatttacgacctgcacagccataccacagcttccgatggctgcctgacgccagaagcattggtgcaccgtgcagtcgagatgcgcgtcggcaccctggcgatcaccgaccatgacaccacagctgcaattgcaccagcaagagaggaaatttcacgttcgggactggcgctgaatcttattcctggtgtggaaatttccacggtctgggaaaatcatgaaattcatattgtcgggctgaatattgatattactcatccgctaatgtgtgagttcctcgcgcagcagacagaacggcgcaatcagcgggcgcagctgattgccgaaagacttgaaaaagcgcaaatacctggggcactggaaggcgcgcaacgactggcgcagggcggtgcggtgacgcgcggtcattttgcgcgtttccttgtggagtgcggaaaagccagttcaatggcggatgtctttaaaaagtatctggcgcgcgggaaaaccggatacgttccgccacagtggtgtacaatagagcaatctattgatgtcattcatcattctggcggtaaggcggtgctagcccatcctgggcggtacaatcttagtgctaaatggctgaaaagattggttgcgcattttgccgaacaccacggcgacgcgatggaagtcgcgcagtgccagcaatcgcccaatgaacgcacccagctggcgacacttgcgcgtcagcatcatttatgggcatcacaaggatctgattttcatcagccatgcccgtggatcgaactgggtcgtaaactctggctgcccgcaggcgttgaaggcgtctggcagctatgggaacagccgcagaacaccacagagagggaattatgagccagtttttttatattcatcctgataacccgcagcaacgcctgatcaaccaggcggtggagatcgtgcgtaaaggcggggtgattgtttatccaactgattccggctatgcgctcggctgtaaaattgaagataaaaacgcgatggagcgtatttgtcgtattcgccagctgccggacggtcacaactttaccctgatgtgtcgcgatctttctgaactctcgacctattcatttgtcgataacgttgcgtttcgtttgatgaaaaacaacacgccaggcaactataccttcatcctgaaggggacgaaggaggtgccacgccgtctgttgcaggaaaaacgcaaaaccatcggtatgcgcgtgccgtctaacccgattgcgcaggcgctgcttgaagcactgggcgaaccgatgctttccacttcgctaatgctgccaggcagtgaatttaccgaatccgatccggaagaaattaaagaccgtctggaaaaacaggtggatttgattattcacggcggctatctcgggcagaaaccaacaacggttattgatctcaccgatgatacgccggtcgtggtgcgtgaaggcgtaggtgatgtgaagcctttcttataacaaattgcgttccacggatggaaaatgatggcagggatatatcgctgcattttgctgttgatagttgggctttttttctcttcgttgagttatgcgaaaaacacggagatcccttcttatgaagaagggatctcgctctttgatgttgaagccactctgcaaccgaatggggtgctcgacatcaaagagaacattcattttcaggcgcgaaatcagcagattaagcacggattttatcgtgatttaccgcgactctggatgcagcctgatggggacgctgcactgctgaactatcatattgttggcgtcacccgtgatggtattcctgaaccctggcatcttgactggcatatcgggttaatgagtattgtcgtgggcgataaacaacgtttcttgcctcaaggcgactatcattatcaaattcattatcaggttaaaaatgctttcctgcgtgagggggattctgatctgctaatctggaacgtgaccggtaaccactggccgtttgaaatttataagaccctattttcactcaagttgcctgatattgcgggtaatccatttagcgaaatcgctctctttactggagaagagggcgacacatatcgaaatggccgcatccttgaggacggaagaattgaatctcgcgatccgttttatcgtgaagatttcacggtcctctaccgctggcctcacgcattacttggtaatgccccggctccacaaacgacgaatattttcagtcatcttcttttaccctctacgtcatcgttgttaatttgctttccgagtctgttcctggcgtgtggatggttatatctctggaagcgcaggccgcaatttacgccggtagatgtgattgaaaccgatgtcattccgccagattacacgcccggcatgttacgtcttgatgcgaaactggtttacgacgataaaggtttttgcgccgatatcgtaaatctgattgtgaaaggaaaaattcatctggaagatcattatgacaagaaccagcaaatcctgattcgtgttaatgaaggcgcgaccagaaataatgcggtattactgcccgcagagcagttattactggaagcgttatttcgtaaaggcgacaaggtcgttcttacggggagacgcaacagagtcttacgcaaggcatttttacggatgcagaaattttatctgccgcgtaaaaagtcttcgttttaccgacctgatgcgtttttgcaatggggcggaatggcaatattggcggtcattctctacggtaacctgagtcccgtaggctgggaaggaatgagtctggtgggcgatatgtttattatgatctgctggcttcttccttttttattttgttcccttgagcttttgtttgcccgcgatgatgacaagccttgcgttaatcgtgtcatcatcactttgtttttaccactgatttgttcaggcgtggccttctattctctctacatcaatgtcggagatgtattcttttactggtatatgccagcgggttattttagcgctgttttcctgaccggttatctcactggcatggggtatatttttctgccaaagtttacccaaaccgggcagcaacgttatgcccacggtgaagctatcgttaactatcttgcgcgtaaagaggcggcaacacacagtgggcggcggcggaaaggggaaacacggaaactggattacgcgttgttaggttgggctatatcggcaaatttggggagggaatgggcgttacgcatcgccccttcgctttcttcggcgatttgcgctccagagattgcccgtaacggcgttttattctcattacagacgcacctgagttgcggggcctataccagtttgttggggcggagctattctggtggtggttctggcgctggtggcggaggcggtggtggttggtaaccaaatcgacgttaatcgaaacaagctttaaccataaagatagtgtagtatgttgcgcctcaaagccaggccagttaaaacgtcgagtcgttgacttaaggcctgaagagttcaaacagactttactatcagtgagtcagatgtaagttctgactcattgttgcacaaaagcatatcagacgcctgggaaggcgacaccaaaaggaagctctatgagcgaaaagctacagaaagtgctggcgcgtgccggccacggttctcgccgtgaaatcgaatctattattgaagccggtcgtgtgagtgttgatggcaaaattgctaaactcggcgatcgcgttgaaattacccctggactgaaaatccgtatcgatggtcacctgatttcggtacgtgagtccgctgaacaaatttgtcgcgttctggcctattacaaaccggaaggtgagttgtgtacccgtaacgatccggaagggcgtccaacggtgtttgaccgtctgccaaagctgcgtggcgcacgctggattgccgtaggtcgtctggacgttaacacctgtggtctgttgttgttcaccaccgacggtgaactggcaaaccgtttaatgcatccaagccgtgaagttgaacgtgaatatgccgtgcgtgtatttggtcaggttgacgacgcgaaactgcgtgatttgagtcgtggcgtgcagctggaagatggtccggcagcctttaaaaccatcaagttcagcggcggcgaagggatcaaccagtggtacaacgttactctgaccgaaggccgtaaccgtgaagttcgtcgtctttgggaagcggttggtgtgcaggtgagccgcctgattcgtgttcgttacggtgatatcccactgccaaaaggtctgccacgcggtggctggacggagctggacctcgcccagactaactatctgcgcgaactggtggaactaccgccagaaaccagctctaaagtcgctgtagaaaaagaccgtcgtcgtatgaaggcgaatcagattcgtcgtgcggtgaaacgtcacagtcaggtgagcggcggtcgtcgttctggtggacgtaataataacggttaatcaaagtatgccggacgtcatatccggcatttttacagattagtaatcaatccctatctgcgcttttacaccggcatcaaacgcatgtttgacggggcgtaattcacttaccgtatccgccagttcaagaatatcccgatgacaaccacgacctgtgataatcaccgtctgttgatgtggacgttcatttaacgcctgcaccacttcttccagtggcaaatagtcatacgccaccatatacgtcagttcatcgagcaaaaccatatccagtgaggaatcagccagcatccgctttgcatgttgccagacttcgcggcaggcggcggtatcagactctcggttttgtgtatcccaggtaaagcccgttgccattacctgaaactcaacgccgtgtggctccagcagatttcgttcaccattaggccaggtgcctttaataaactgcacgacgcccactttttttccgtgaccaactgcgcgtgttgccgtaccaaatgccgcggtggttttgccttttccattgccggtaaagacgatgataataccgcgttcatcctgggcctgggccacacgagcatctactttttctttcactcgctgctgacgctgttggtagcgttcatcactcattgggaaattcctggtttacggcccggttgggcgtcaaaggtcatgccggttttacggcggctgtcatcgcccatcagccagaggtagagcggcatgatatcagcgggggttttaagtttctgtggatcttcggtcgggaaggcgctggcccgcattgcggtgcgcgtaccgcctgggttaatgcagttgacacgcaggcgctgctgatattcatcggccagtacctgcatcatcccttcggtggcaaatttcgacgctgcatatgcgccccagtttgcacgcccctgacgtccaacgcttgatgaggtaaagaccagtgaaccggcatccgatttgagtaataaaggaagcagtgcctgtgtgagcataaaggtggcattaacgttgacctgcatgacgtcctgccagacctgcggatcttgttcgctcattgggcaaacatcgccgagcaatccggcattatgcaaaacaccatccagacgcggataattaacggcaatgcgctgtgccagttgttggcaatcttcggacgtgcaggttagcaaatcgagaataaaccactgtggctgacgtccagtttcttcgtttatgtggctggctacctgacgtaatttttcttcattacggcccaaaagaatcactgtcgcaccatagcgtgcatacgtcatcgctgcttcacgaccaattccatcgctggctcccgtcaccaggataatgcgatcattgagtaaatcttgttttggctggtaatgcatggctactcctcaacgacgttgtctgtcgcgctgccagtgtactttatgactttggggctttatgcctgaaacagaagggcatttcaatcagcctggggcgataacaccgcaaaatggatactttgtcatactttcgctgcaataacatctctgcgagacggctaaacatgcctgttgtaaactgtgagccaaagcgttgtttaaccaaggtggggactcgtggaattgttgtctgaatatggtttgtttttggcgaaaatcgttaccgttgtgctagcgattgcggcgattgccgccattattgtcaatgttgctcaacgtaataaacgccagcgtggcgagttacaggtcaacaatctcagcgaacagtataaggagatgaaagaagaactggccgcggcgctgatggatactcatcagcaaaaacagtggcacaaagcgcagaagaaaaagcacaagcaagaagcgaaagccgcaaaagcgaaagctaaactgggcgaggtggcaactgacagtaaacctcgcgtctgggtgctggattttaaaggcagcatggacgcccatgaagtgaactcgctacgtgaagagataacggcggtactcgcagcattcaaaccgcaggatcaggttgtgctccgtctggaaagcccaggtggcatggtgcatggttacgggttggcggcttcgcagttgcagcgtctgcgtgataaaaacattcctttaactgttacggtagacaaagtcgctgccagcggcggttacatgatggcctgtgtggcggacaaaattgtttccgcaccgtttgctattgtgggttccattggggtggtggcgcaaatgcccaactttaaccgcttcctgaaaagcaaagatattgatatcgaactgcacaccgccgggcagtataagcgcacgctgacgttgctgggtgaaaataccgaagaagggcgggagaaattccgcgaagagttgaacgaaacgcatcagttatttaaagattttgtgaagcgtatgcgtccgtctctggatattgaacaggtggcaacgggtgaacactggtacggacaacaggcagtagagaaaggcctggttgatgaaatcaacaccagtgatgaagttattcttagcctgatggaaggccgggaagtggtcaatgtacgctatatgcagcgtaaacgactcattgaccgattcaccggcagcgcggcagagagcgccgatcgattgttgttacgctggtggcagcgtgggcaaaagccgttgatgtaaaagacaaacgcgaggataagacctcgcgttttgcttgtttatttaatcaaccaggtgatatttttctgaaagcacatgggccaggtgtttgaacatattaaacaccgcggtgcttttggcagttggtaatccttgttcatctaaaaagtagtcgccggtaaataccagcacgccattacgctgcgtgacgccggtggcttcaatccctgcgagcgtatcctcatgctcacgaatgattttgttggcctctttcaacagcgtttcgcggtcgatgggttgagtctctttgttcattatttatttaatcaaccaggtgatatttttctgaaagcacatgggccaggtgtttgaacatattaaacaccgcggtgcttttggcagttggtaatccttgttcatctaaaaagtagtcgccggtaaataccagcacgccattacgctgcgtgacgccggtggcttcaatccctgcgagcgtatcctcatgctcacgaatgattttgttggcctctttcaacagcgtttcgcggtcgatgggttgagtctctttgttcattatttactccttaaacaaggacattagtctacgccaggcatggcttgcagacaaatataccacgctggtggcaagagcgccttactggcaactttggattttgcatgctaataaagttgcgtatcggattttatcaggtacagtgtgacgctttcgtcaatctggcaatagatttgcttgacattcgaccaaaattccgtcgtgctatagcgcctgtaggccaagacctgttaactcagtcacctgaattttcgtgagcagagtcacgacaaggggttgatatccgcagagagcgagtccatatcggtaactcgttgccagtggaaggtttatcaacgtgcgacgcattcctggaagaatcaaattaggtaaggtgaatatgggtaaagctcttgtcatcgttgagtccccggcaaaagccaaaacgatcaacaagtatctgggtagtgactacgtggtgaaatccagcgtcggtcacatccgcgatttgccgaccagtggctcaactgccaaaaagagtgccgactctacctccaccaagacggctaaaaagcctaaaaaggatgaacgtggcgctctcgtcaaccgtatgggggttgacccgtggcacaattgggaggcgcactatgaagtgttgcctggtaaagagaaggtcgtctctgaactgaaacaactggctgaaaaagccgaccacatctatctcgcaaccgaccttgaccgcgaaggggaagccattgcatggcacctgcgggaagtgattggtggtgatgatgcgcgctatagccgagtggtgtttaacgaaattactaaaaacgcgatccgccaggcatttaacaaaccgggtgaactgaatattgatcgtgttaatgcccagcaggcgcgtcgctttatggaccgcgtggtggggtatatggtttcgccgcttctatggaaaaagatcgctcgtggtctgtctgccggtcgtgtgcagtcggtggcggtccgcctggtggtcgagcgtgagcgtgaaattaaagcgttcgtaccggaagagttctgggaagtcgatgccagcacgaccacgccatctggtgaagcgttggcgttgcaggtgactcatcagaacgacaaaccgttccgtccggtcaacaaagaacaaactcaggctgcggtaagtctgctggaaaaagcgcgctacagcgtgctggaacgtgaagacaaaccgacaaccagtaaacctggcgctccttttattacctctacgctgcaacaagctgccagcacccgtcttggttttggcgtgaaaaaaaccatgatgatggcgcagcgtttgtatgaagcaggctatatcacttacatgcgtaccgactctaccaacctgagtcaggacgcggtaaatatggttcgcggttatatcagcgataattttggtaagaaatatctgccggaaagtccgaatcagtacgccagcaaagaaaactcacaggaagcgcacgaagcgattcgtccttctgacgtcaatgtgatggcggaatcgttgaaggatatggaagcagatgcgcagaaactgtaccagttaatctggcgtcagttcgtagcctgccagatgaccccagcgaaatatgactccacgacgctgaccgttggtgcgggcgatttccgcctgaaagcacgcggtcgtattttgcgctttgatggctggacgaaagtgatgcctgcactgcgtaaaggcgatgaagatcgtatcttaccggcagtcgataaaggcgatgctctgacgctcgttgaactgacaccagcccagcactttaccaagcctccagcccgtttcagtgaagcatcgctggtcaaagagctggaaaaacgcggtatcggtcgtccttctacctatgcgtcgatcatttcgactattcaggatcgtggctatgtgcgagtagaaaatcgtcgtttctatgcggaaaaaatgggcgaaatcgtcaccgatcgcctggaagagaatttccgcgagttaatgaactacgatttcaccgcgcagatggaaaacagcctcgaccaggtggcaaatcacgaagcagagtggaaagctgtactggatcacttcttctcggatttcacccagcagttagataaagctgaaaaagatccggaagagggtggtatgcgcccgaaccagatggttctgaccagcattgactgcccgacttgtggtcgcaaaatggggattcgcacagcgagcaccggggtattccttggctgttctggctatgcgctgccgccgaaagagcgttgcaaaaccaccattaacctggtgccggaaaacgaagtgctgaacgtgctggaaggtgaagacgctgaaaccaatgcgttgcgcgcaaaacgtcgttgcccgaaatgcggcacggcgatggacagctatctcatcgatccgaaacgtaagttgcatgtctgtggtaataacccaacctgcgacggttacgagatcgaagagggtgaattccgcattaaaggttatgacggcccgatcgttgagtgtgaaaaatgtggctctgaaatgcacctgaaaatggggcgtttcggtaaatacatggcctgcaccaacgaagagtgtaaaaacacacgtaagattttacgtaacggcgaagtggcaccaccgaaagaagatccggtgccattaccggagctgccgtgcgaaaaatcagatgcctatttcgtgttgcgtgacggtgctgccggtgtgttcctggcggccaataccttcccgaaatcgcgtgaaacgcgtgcgccgctggtggaggagctttatcgcttccgcgaccgtctgccggaaaaactgcgttatctggccgatgcgccacagcaggatccggaaggtaataagaccatggttcgctttagccgtaaaaccaaacagcaatatgtctcttcggaaaaagacggaaaggcgactggctggtcagcattttatgttgatggcaaatgggttgaagggaaaaaataacctttaattctgtcgggtttttataaacaaagggccgcgaaagcggcccttttttattgcatattattttttcttcacacctatacactaaggctataaatgatatagtggttatagttagcaccttttttattattaaatcgtattagtcacccgcctggtgtgacgaaaaaacgatgttctgatggcgtctaagtggatggtttaacatgaaattacaacaacttcgctatattgttgaggtggtcaatcataacctgaatgtctcatcaacggcggaaggactttacacatcacaacccgggatcagtaaacaagtcagaatgctggaagacgagctgggcattcaaattttttcccgaagcggcaagcacctgacgcaggtaacgccagcaggacaagaaataattcgtatcgctcgtgaagttctgtcgaaagtcgatgccataaaatcggtcgccggagagcacacctggccggataaaggctcgttgtatatcgccaccacgcatactcaggcacgctatgcgttaccaaacgttatcaaaggctttattgagcgttatcctcgcgtttctttgcatatgcaccagggctcgccgacacaaattgctgatgccgtctctaaaggcaatgccgatttcgctatcgccacggaagcgctgcatctgtatgaagatttagtgatgctaccgtgctaccactggaatcgggctatagtagtcactccggatcacccgctggcaggtaaaaaagccattaccattgaagaactggcgcaatatccgttggtgacatataccttcggctttaccggacgttcagaactggatactgcctttaaccgcgcagggttaacgccgcgtatcgtcttcacggcaacggatgctgacgtcattaaaacttacgtccggttagggctgggggtaggggtcattgccagcatggcggtggatccggtcgccgatcccgaccttgtgcgtgttgatgctcacgacatcttcagccacagtacaaccaaaattggttttcgccgtagtacttttttgcgtagttatatgtatgatttcattcagcgttttgcaccgcatttaacgcgtgatgtcgttgatgcggctgtcgcattgcgctctaatgaagaaattgaggtcatgtttaaagatataaaactgccggaaaaataatttcttgcgttattttcggcaccttttatgtagcgaaggtgccggaatatattctcctttgttacttatttgtatccggtgcacaatatttttatccctcatatttatagggtaaattacctgtaaagtagtgtctaattacacacctcgcaaactccagttttcaaatatctatttcaggtcaaaagattgaattattcactggagacgattcgtaaattcgctggatttttgactaaagtttctttaggatttgtctcatcgtatgattaattacaccaatcgttcaacgtcttgctgataagtgatggcgattatatgaggttagcaatgccttctggaaatcaggaaccccgccgcaatcctgaattaaaacgtaaagcctggctggcggtttttcttggttctgcacttttctgggtggttgtcgcactgcttatttggaaattgtggggataactatggtcggtcaggagcaactggagtcgtcaccattatgtcagcatagtgacaatgaaccagaagcaaaacgggaatgttccgtcgttattccagacgactggcaactaacatcgcagcaacaagcctttatagaactgtttgctgaagatgatcagccgaaacaataattatcatcattcttattacccatttttaatgaattacagggcttttaatacaccgcagcaataacaggttgagttatctcaacacaaagtaataaccgttaagggtgtagcctatgatcaacacaaatatgaaatattggtcctggatgggcgcattttctctgtcgatgctcttctgggccgaactcctctggatcattactcactgatccctgaccccgctgtttgctttgcctcaaggtttctcctcttttatcaatttgggttgttatcaaattgttacgcgatgtttgtgttatctttaatattcaccctgaagagaatcagggcttcgcaaccctgtcattaaggaggagctatgtcgtcaaccctacgagaagccagtaaagacacgttgcaggccaaagataaaacttaccactactacagcctgccgcttgctgccaaatcactgggcgatatcacccgtctacccaagtcactcaaagttttgctcgaaaacctgctgcgttggcaggatggtaaatcggttaccgaagaggatatccacgcgctggcgggatggctgaaaaatgcccatgctgaccgtgaaattgcctaccgcccggcaagagtgctgatgcaggactttaccggcgtacctgccgttgttgatctggcggcaatgcgcgaagcggttaaacgcctcggcggcgatactgcaaaggttaacccactctcaccggtcgacctggtcattgaccactcggtgaccgtcgatcgttttggtgatgatgaggcatttgaagaaaacgtacgcctggaaatggagcgcaaccacgaacgttatgtgttcctgaaatggggaaagcaggcgttcagtcggtttagcgtcgtgccgccaggcacaggcatttgccatcaggttaacctcgaatatctcggcaaagcagtgtggagcgaattgcaggacggtgaatggattgcttatccggatacactcgttggtactgactcgcacaccaccatgatcaacggccttggcgtgctggggtggggcgttggtggcatcgaagcagaagccgcaatgttaggccagccggtttccatgcttatcccggacgtagtgggctttaaacttaccggaaaattacgtgaaggtattaccgccacagacctggttctcactgttacccaaatgttgcgcaaacatggcgtggtggggaaattcgtcgaattttatggtgatgggctggattcactaccgctggcggatcgcgccaccattgccaatatgtcgccagaatatggtgccacctgtggcttcttcccaatcgatgctgtcaccctcgattacatgcgtttaagcgggcgcagtgaagatcaggtcgagttggtcgaaaaatatgccaaagcgcagggcatgtggcgtaatccgggcgatgaaccaatttttaccagtgtgttagaactggatatgaatgacgttgaagcgagcctggcagggccaaaacgcccacaggatcgcgttgcactgcccgatgtaccaaaagcatttgctgccagtagcgaactggaagtgaatgccacgcataaagatcgcctgccggtcgattatgttatgaacggacatcagtatcagttacctgatggcgctgtggtcattgctgcgataacgtcgtgcaccaacacctctaacccaagtgtgttgatggccgcaggcttgctggcgaaaaaagccgtaacgctgggcctcaagcggcaaccgtgggtcaaagcgtcgctggcaccgggttcgaaagtcgtttctgattatctggcaaaagcgaaactgacaccgtatctcgatgaactgggatttaaccttgtgggatacggttgtaccacctgtattggtaactctggaccgttgcccgatcctatcgaaacggcaatcaaaaaaggcgatttaaccgtcggtgcagtgctgtccggcaaccgtaactttgaaggccgtatccatccgctggttaaaaccaactggctggcctcgccgccgctggtggttgcctatgcgctggcgggaaatatgaatatcaacctggcttctgagcctatcggccatgatcgcaaaggcgagccggtatatctgaaagatatctggccatcggcacaagaaattgcccgtgcggtagaccaagtctccacagaaatgttccgcaaagagtacgcagaagtttttgaaggcacatctgagtggaaggaaattaacgtcacacgatccgatacctacggttggcaggaggattcaacctatattcgcttatcgcctttctttgatgaaatgcaggcaacaccagcacctgtggaagatattcacggtgcgcggatcctcgcaatgctgggggattcagtcaccactgaccatatctctccggcgggcagtattaagcccgacagcccggcgggtcgatatctacaaggtcggggtgttgagcggaaagactttaactcctatggttcgcggcgtggtaaccatgaagtgatgatgcgcggcaccttcgccaatattcgcatccgtaatgaaatggtgcctggcgttgaaggggggatgacgcgccatttacctgacagcgatgtcgtctctatttatgatgccgcaatgcgctataagcaggagcaaacgccgctggcggtgattgccgggaaagagtatggatcaggctccagccgtgactgggcggcaaaaggtccgcgtctgcttggtattcgtgttgtgattgccgaatcgtttgaacgaattcaccgttcgaatttaattggcatgggcatcctgccgctggaatttccacaaggtgtgacgcgtaaaacgttagagcttaccggggaagagaagattgatattggtgatctgcaaaatctacaacccggcgcgacggttccggtgacgcttacgcgcgcggatggtagccaggaagtcgtaccctgccgttgtcgtatcgacaccgcgacggagttgacctactaccagaacgacggcattttgcattatgtcattcgtaatatgttgaagtaacgagtatttgcttgccggttattttgcttccggcaagcaaattaattacacaatgcaagagggttatttgttcagcaaatgacccattttctcggctttggtatcgagataatgttcgttattggggttacgacctacaatcaacggtacgcgttcaataatattaatccctgcttcggtcagaatttcgacttttttcgggttattggttaacaagcggacttcattgacgccaaggagtttgaacatatcagcgcaaagagtgaagtcgcgctcatcagcggcgaagcctaactggtggttagcctctacagtatcgtaaccttgatcctgcagtgcgtaagcgcggattttattcagcagaccaatgttacgaccttcctgacggtgatacagcaaaataccacggccttcctcggcaatttgcgtcaatgccgcttcgagctggaagccacaatcgcagcgcaagctgaacagggcgtcaccggtcagacattcggaatggacgcgcgcaagtaccggggtatgcccggaaatatcgccatagactagcgcgacatgatcgtgtccggttgccagttcttcaaatcccaccatcaggaaatcgccccatggggttggcagtttggcttctgccacacgtttaagctgcatgaaattctccagataatgctggttctgtattggcttattttgccataacgagaaggggttcacctaatcacgacgcgtcgatcgttcacggaatggcacaaatctgtcaatttttcctggaactggcattttcagttatgattgtgggacttatcaaaaaggagaggccatgcgttcgattgccagacgtaccgcagtgggagctgcactattgcttgtcatgccagtagccgtatggatttctggctggcgttggcaacctggagaacaaagttggttactaaaagcggctttttgggttactgaaactgtcacccagccctggggcgtcattacacatttgattttattcggctggtttctctggtgtctgcgttttcgcattaaggctgccattatgttatttgccattctggcggcggcaatccttatgggacaaggcgttaaatcctggatcaaagacaaagtccaggaaccacgaccttttgttatgtggctggaaaaaacacatcatattccggttgatgagttctacactttaaagcgagcagaacgcggaaatctggtgaaagaacagttggctgaagagaaaaatatcccacaatatttgcgttcacactggcagaaagagacggggtttgcctttccttccggtcacacgatgtttgctgccagttgggcactgctggccgttggtttgctgtggccgcgtcggcgaacgttaaccattgctatcttgttggtctgggcaacgggagtcatgggaagccgcctgctgctcgggatgcattggccacgcgatctggttgtagctacgttgatttcctgggcgctggtggcggtggcaacgtggcttgcgcaacgaatttgtgggccattaacaccacctgcggaagaaaatcgcgaaattgcacaacgagaacaagaaagttaacgctggttgattttccgaatttagcccttaaatcatcaacaatgcgcgtggatgccatttcgcagacggcgcgaaaatggtactttaaagggctattgcggtaagttgaccataatttattcgctctaaccacataacgggaagtaatgtgaaatatttactcattttcttactggtgttagcgatcttcgtgatttcggtcacgttgggtgcgcagaacgatcaacaggtgacgtttaattatctgttagcgcaaggggagtaccgtatttccacattgctggcggtattgtttgctgcggggtttgctatcggttggttgatttgtggcctgttctggctgcgagttcgtgtttccctggcgcgcgctgaacgtaaaataaagcgactggaaaaccagctttcacccgcgactgacgtggctgtagcgccgcactcgtctgcgtcgaaggaataactttctatgctggagttgttgtttctgcttttgcctgtagccgctgcctatggctggtatatgggccgcagaagtgcgcaacaaaacaagcaagatgaagccaaccgcttgtcgcgtgattacgtagcgggggttaacttcctgcttagtaatcaacaggataaagcggtagacctgtttctcgatatgcttaaagaggatacaggtaccgttgaagcccaccttacgctcggaaacctgttccgttcgcgtggcgaagttgatcgcgctattcgcatccatcagaccctaatggaaagcgcctcgctgacctatgaacagcggcttttggcgattcaacaactggggcgtgattacatggctgccgggttatacgaccgcgcggaagacatgttcaatcagctgaccgatgaaactgacttccgcattggcgcgctgcaacaactgctacaaatttaccaggctaccagcgagtggcagaaagcaattgatgttgccgaacgcctggtgaagctgggtaaagataaacagcgcgtcgaaattgcccatttctactgtgagttagctctgcagcatatggccagcgacgatctcgatcgtgccatgactttgctaaaaaaaggtgcggcggcagataaaaacagcgcccgcgtatccatcatgatgggacgcgtgtttatggcgaaaggagaatacgccaaagccgtcgaaagtttgcaacgtgtcatatcccaggacagagaactggtcagcgaaacgctggaaatgctgcaaacatgctatcagcagttgggtaaaactgccgaatgggcagaattcctgcagcgcgcggtggaagagaacaccggtgccgatgctgaattgatgcttgcggatatcatcgaagcgcgcgacggtagtgaggccgcacaggtctatattactcgccagcttcagcgtcatccgaccatgcgtgtgttccataagttaatggattaccacttaaatgaagcagaagaagggcgtgccaaagagagtctgatggtgctgcgtgacatggttggcgagaaggtacgtagtaagccccgttatcgctgccagaaatgtggttttaccgcatacaccctctactggcattgtccgtcttgtcgggcctggtcaaccattaaaccaattcgcggtcttgatggcctgtaattttaaaaaaatccgactttagttacaacatactaattattgatgttctattgtgctccggcaccgacggcgcggaaaagcctgccagaggagaaatcgcaactgttaattttttatttccacgggtagaatgctcgccgtttacctgtttcgcgccacttccggtgcccatcatcaagaaggtctggtcatgacgttaactgcttcatcttcttcccgcgctgttacgaattctcctgtagttgttgcccttgattatcataatcgcgatgccgcgatggcctttgtcgacaagatcgacccacgcgattgtcgtctgaaggtcggcaaagagatgtttacattgtttgggccacagtttgtgagcgaacttcaacagcgtggttttgatatctttcttgacctgaaattccacgatattcccaacactgcagcacacgctgtcgctgctgcggctgacttaggcgtgtggatggtgaatgttcatgcctccggtggggcgcgtatgatggccgcagcgcgtgaggcactggttccgtttggcaaagatgcaccgcttttgattgctgtgacagtgttgaccagcatggaagccagcgacctggccgatcttggcgtgacactgtcacctgcagattatgcagaacgtctggcggcactgacgcaaaaatgtggccttgatggtgtggtgtgttctgctcaggaagctgtgcgctttaaacaggtattcggtcaggagttcaaactggttacgccgggcattcgtccgcaggggagtgatgctggtgaccagcgccgcattatgacgccagaacaggcgttgtcggctggtgttgattatatggtgattggtcgcccggtaacgcaatcggtagatccagcgcagacgctgaaagcgatcaacgcctctttacagcggagtgcatgatgagtgattccaacagtcgtctggtctactcaacggaaaccggacgtattgatgagccaaaagcggcccctgtacgccctaaaggcgacggtgtggtgcgtattcagcgtcagaccagtggacgcaaaggtaagggcgtttgcctgattaccggtgtcgatctcgatgatgccgaactgacgaaactggcagctgaactgaagaaaaaatgcggctgcggcggagcagttaaagatggaattattgaaattcagggcgataagcgtgatttattaaaatcaatgcttgaagcgaaagggatgaaggtaaaactcgcaggcggctaacataaaaagccacggatatatccgtggctttcgaatattttactgtgtgtattattcagttatttcgtactgaacagaatcaagcgtattataattgcgagtcgataatcgacatttatttacgattatttaccgacctggtgaccaataacaccaccgacggctgcaccacctaatgtacccaacgtactgccatcggtcagtactgcaccgcctaatgcccctgcacctgcaccgattgcggtgttgcggtcccgtttagaccagttagaacaggcactcagagacattgccagggtaattgccagaacagccgcggtcatttttttgctcgttacaaacataatactctctcctgaatttatgattcacggaagtaagctctctataactataatagctaagaataagccaggtgaaattattccgtgaaatccgctcgcgcgcagggttatatcacgcaggtgataatgacttcctgttatatcgctgataataattttatatcttgagagtgttaataacaggtaaatagtcttaattatcaaccaggaatcatcttagagcggatgatttgccaaactgcaaatcatccgtagagaagggaaatggttaaatgtcaacgacgtgaacggtgagtttactgtgctcaagatgcatcagatcgctggcgcgtattttcgaatcggtaatcacgcgattgaatcgctcaacggggccgatggagtatgaatgtacagcaccaaatttcgagctgtcggtcaggactatcgcctcgcactctttttccagcacggcattgaccacatcggtacgcatcatatcgcgaccggtaaacccagtttcaggttgccagccatcaataccaataaatgctttgctgaaatgcacctgttggatgcactggcgtgtcaaagggccaaccatactttcgctttttttctggtacacgccaccgagcaaaatgacttcacaaggcgcgtctttcagcaaatgcgcgatgtagctgctgaccgtgatgatagtggcatttttcttctgctcgcccagagtcctggcgagcagggcattgctgctaccattttcgataaagatggtttcgcccggttgaaccagtgacgcggcaaactcggcgagttcacgcttcagcgtatagttgctcatcatacgggtttcgacgtcatcactatcaagcgaaactgcaaaaccatgtgcacgtcggaggtaactcagtttttcgagggtgttgagatcctggcgaatggtaacttcagaaactccagtggcttttgccagatcggttacgctaacctgaccctggtcaatgaccatctgtagaatagtttgttgtcgggaattcatcgctgtaattcttataacgttataatactaaataaaaaatactgacgcgccgggcatcctcaaataggaaaacctgaaggcacgattgttagatctcccacggtgccttcgggatgtctggcgtagattcagcaacctggcgcaagagttctgctttaagtatctcgagattatggatcgcagagtggtaatcgcctgccacaaggatatctaacacaatatcaatacgttcggcaacgcgctgggcatcaaattcagacatcaaggacatccttatagcaaaaggggaaaaatgaataatgcaaaaattgccgctaaaagagaagtgtttaacagcaacggctaattatcatccgggaatacgatatataatgacggaatatagcgctaagtatatatattcatctacttatgcgcgcttcagatagcgtttataccagcgttcgaaggcaacggcgggcatcggtttggcaaacaaaaatccttgtcgctcattgatcccgttcttggttaaaaaagcatcttcctttgcactttctacaccttcggcgatcacctgaagattcaatgcctgggccacagcgacgatcgcccggaccagtgattgcgagacaggctgtttgtgaatatcccgaacaaaaacctggtcaagtttgatggcatcgatcggaaagcgcgccagttgcgaaagtgaagagtagccggtaccaaaatcgtccagatgaacttgcgcacctaatcggctaaattgttgaataacagacagtgccagttcatcattctcaatcaggcagctctccgtcagttcaacatctatagggcagtattcaaaattgagttcctggagaacctgtttcagggcggtgaaaatggtttgatcggcgagctgacgtgcagaaatatttaccgccactcgcaggttaatgcctttatcccgccacttcgctacctggcgtacgacatcgagaatcacccaacggcctaaaggcacaattagccctgattcttcggcgtaggaaatgaagtccaacggtggaatcaacccacgttcaggtgactgccaacgtactagtgcttccagactgcgcacttcgccacgccaggtgattttcggttgatagtgaataaccaactgatcgttttccagtgctttacgcaagttggtatccagccagagatattcaaatacccgctgattcatttctggggtaaaaacgcaaaattgtcctcgtccgccttccttcgctgtgtacattgctgtgtcggcgtgacgaataatagccgcgctgtccgaaccatgttcgggagagagtgaaatacctactgaacagctggtataaacttcaattaaaccaatgcgaaaggggagtcgtaagcgggtcaaaattcgtgatgccaatgcttccagcgcgctttgtgaggtattggatgccagtaccagaaactcatcgccacctggacgcgccaatacttggtcatgttcgagacagcttaaaatagccaatgacacgtcgcgtaataactggtcaccaaacaaatgcccataggcgtcgttgacctttttaaaattatccaaatcaagatacacaaccccaactttattgttatctgcctgattaatagcgtgatcgattaactcctgcatcgcgttacgattcggcagtccggtgatactgtcggtatttgccagaatacgcagtcgctcctgagcgcggcgctcttcggtaatgtcggtgccggaacagattaaaaaaatctcgtttttgccactgccgctgtggacaaatttattgcgaaacagaaacagccgctggcctttacgtgttggtatccatagttcgacttcatatgcattgccgcttcgaaaaaatacacggttattgcgcctggatgccgcagcttcacgacgactcataaacagtttaaacacgctttgcccaatgacgtcgtgttctttcaaccctgtgtaatcttcacataaccgattgaagcgctggatattcccccggctgtcgagaatcactattgcggaatgtgcttcagaaactacctgctcagcaaaggaaagcccatgtgataaatcacgagcaaccgccggtgtgtcatgccatgcagacgcgttgcctccccattctcgtttattgatttttcgtcctaccagatgcacagaaagatcgctttcatcgacggtcagactcatcatcaggctggaggtgatgaccgtcatttccctgatgcgagcagcctgttcggcagatagttgcaaaatacgatcgggttctgtgatttcggtggtagaaaagcgcaaaacatcgctgctttccgtcaaccgccagtatggattgtgcgatccgagaaagttgtacaacgttgtggactccctaacggttttcatgatgcatatcctccggttaacagcggagtccgcagttaaataaaaggaacaacatgacttacatgaaattaacggcggctaaacacattgtttttttatatatttatttgtaatccagttttggaaaaacgccagttttcaaacgaaagtcagttaaaaatctgccgggatatgacgaaggttgagcggggaaataaacggcccatccatgaggaatgggccgtgaaaggagattacgcgactgggcgcgcaataatgctgcgggtttccatgcggacttcggcaatggtgacgtcaataacgtcagtcactttgtaagccgtttcacctttaatttgtacagtgccgttttcctggctgcaaaccagttcatcgcgcacagcgtgtaagaaaggtgctggaataaaggcgatagcgccgttatcaaccaaacgaacacgcatgccgccacggctgatatcgacaatttccgccgcgaaacgggtgtcggtcccggctttgtctttcaggaagcgtgcgtataaccagtcgccaacatcacgttctgccatccggttgagacggcgacgctcggccatttggacagtgatttcatcctgtggacgcgtcgcagtttcgcctttgataaccgctttcagcagacggtggttgatcatgtcgccatatttacggatcggcgaagtccaggtggcgtatgcttccagaccgaggccaaagtgaggaccgggttcagtgctaatttcagcaaatgactggaagcgacgaatgcggctgtcgaggaaaccagttggttgcgcatccagttcacgacgcagtttgcagaaaccgtccagcgtgagcacttcttcagcatcgacatgcagaccgtgcgttttcagcaacgctgccaacgcgtcggcattcgccggatcaaagcccatatgcacgttatagatgccaaaaccgagcttatcgcgcagtacgcgggccgcacaaatgttagcggcaatcatcgcttcttcgacgatacggttggcaatgcgacgaggctcggcgacgatatccagcacttcacctttttcaccgagaataaagcggtaatccgggcgatctttaaacaccagtgcgtggttatgacgccactcgccgcggcgttggcaaatttgtgctagcaaacggacttgttcggcaattgcttcgctttcaggctgccagtcaccggtattttccagccagtcagaaacctggtcatacaccagcttcgctttggattcgatggtggcggcaaagaattcgatattatcttcaatggtgccatcagtggagagcgtcatgcggcatgccagtaccgggcggacttcattggcgcgcagtgagcagagatcgtcagaaagctcgcgaggcagcatagggatgttgaagccaggcagatagttggtgaatgcgcgaattttcgcggctttgtccagcttgctgccttcagcaatccacgcggttggatcggcaatcgccacaatcagctgaagtttgccatccggtaacgccttggcgaaaagggcgtcatccatatcttctgtgctggcactgtcgatggtgacaaaatccagcgcagtcagatcttcacgaaccagaccttcatcgagcatttcggtagcgacgccgtctggtgcttctttttccagattatgacgcgcaagggtaacccaccacggtacaaagtgatcgtcaccaaaagtgatgtattgtgtcagttcagcatagaaagaacgatcgcctttcagcggatgacggcgcatttcggcaaccgcccagtcgccttctttaaactcgtggttcaggccacgggctgcgcggcaaggaatggcgtcttttaagagtggatgatcaggaacgatggccagacggtcatttttgccctgaactttacccacgaaacgagtcaggaacggttcaaccagttcttctggctccgcggattcacgttctttttcactgtggatcaccgcgataattcggtcgccatgcatgacttttttcatctgcggcggcggaatgaaataacttttttgcgcgtcgacttccaggaagccaaagcctttttctgtggcttttaccaccccttcagcgcgtggcgtctgggaatgcagttgctgtttaagctgcgctagcagcgggttgtcctgaaacataattgtctattttggtggccattagagcggctgacagttttacgcgaatctgtctgacgcggcaaggttaatatgtctcacccaacgcgatttttaagcgatttatccagccacacagcccgctccataccagcagattaataatctgcgttgatgatttttcgtgttcgagtaatgggctgaactgggcggcgctaaagcgatcgggtgctcgggtcagccattgtatcgcctgaacggtagcgcgctcaacagaatgacggtcagcccatcggttaatttcattttcgcccttgcgcagaaaggggctgatttttttatattcatttgatgaattcatacaggcggcaaaacaagcaggactgccatttatccgcgcgcataacaacgccgcaagctgattatccggctgtgtattgacccgtgtgctgtttaacaacttttcgagaagggaaagtgaaatagggtggagagagagtgtttcggccagttggcaaagttctgcagttgaactttttgtgtgctcttcagggagtttttccacctcatagctgcttcgccagcgtaatgattcatcagcaaacagtgacgcgtcggcgtagttttgtatctccagcccgggtaaccagcgtaccggatacccgagataagcctgaaatgtcgcaattgtccgcgcctgaaagccaataaaaccaatgatttggttaatgatcacacagtcacagacagtaagaccaacgtcattcagatgctggcgcgatcggttgtcgataatagaaggcgagctagccagttggcgggcatattgcgtgatttgtgccaaccgatgattactttccctggaggaatcaggcccggggagcggcgtaagtcgcgccgaatagtagttacataaccgttggacgccgcaaacctgagcaaccgtcagggccgtcgacaagcgttcataagcggtgaaggtctgtgaacgggtcacggtaagcgggtcagggaacaactctactgcaagaacgcgcgcagggaccagccatgaaaggaagggtgccagcgtttcttcatcaaggatcacgtcgagcagaaagggatcgctgacctttgcggcttccgggaccagaggcagaacgtcatactccgcagtactggattgcgtttcatgataccagtggcttttgccggtgatgtggcgttgttccatgggcgctccttggtcgtaaaggaaatcgttatcctgacgcaaggcgggaaggggagaaagacggatcggcgataacaaatatcagaaaggtataacagagataacgggcggcagaacgccgcccaatatttaccaacagaacgattatttcagttcgagttcgttcattgcagcgatgctgaaaccgccgtcaacgtggaccacttcaccggagataccggcagagagatcggagcacaggaatgccgcggagttacccacatcttcaatagtaacggtacggcgaatcggggtaacggcttcgcaatgagccagcattttgcggaagtctttgataccggaagccgccagagtacggatcggaccagcagagatggcgttaacacgcacaccttccggacccatcgcgttcgccatatagcgcacgttcgcttccagagacgcttttgccagacccataacgttgtaattcgggatagcgcgctcagcgccaaggtaggaaagggtcagcagggcagaacccggattcagcatggagcggcaagcttttgccattgcaacgaagctgtaggagctgatgtcgtgggcaattttgaagccttcacgagtaacggcgttaacatagtcaccatccagctgatcgccaggtgcaaaaccaatagagtgtacgaaaccgtcaaatttcggccaaactttccccagttcagcgaacatggtgtcgatgctggtatcttcggcaacatcgcactgcagaacgatgtcagaacccaattgagcggcaaattcttctacgcggcctttcagtttgtcgttctggtaggtgaatgccagttcagctccttcgcggtgcatcgcctgagcgataccgtaggcgatggacagtttgctggcaacaccggttaccagaatgcgcttaccggaaagaaaacccatagctttaatccttattgttgatgcttgttgtgcctgaaaatcaggcgattcgtcgttttagtaaacagtacgaacagataaacggttattataatcaacctggctgtgggtggctatagttgcgctttctgtagcggagagaagctgcggtacagagcattttgcgttatctactcctgacgcctgcaagggggaggttggggaaatatcttatagaatctgactatgaaactattcgtattagctccgataaatttgatgatgaaaacagaactggcgacaacaagtcgctgtctttctgatgaattgaccccaacttaatattgtcaactatcttcacagaatctccacaatctcttcattatcagaatatgcatcatgaataagataaaaatactttccattactttggagaaacgtataattagcaaaaatgagaacgatcattctcatcaagtgataggccaggagacagaaatgaccagcaagctggagatacgccacaaacagcgccaggatgaaatcattaacgccgcccgtcggtgttttcgtcgctgcggatttcatgccgccagtatgtcgcaaattgccagcgaagctcagcttagcgtgggtcagatatatcgttacttcgccaacaaagacgccattattgaagagatggttcgtcgtatcatcgactttcgtattgcccaaatggacattgacgcgcgtaccgatcacttcccggaagtccttgccttgcgtaaatccttaaatgaggacgacgacgcgctgatgctggaagtggctgcagaagccacacgcaacccgcgggttatggcaatgcttgaagaagctgacgccagaatgttcgctaacggttgtgcacatatgaaaagaatgcatccccatcttagcgacgagcacattcgttgctgcgttgaagtgtttgctaccatgatggaaggtacggtttatcgtcgtttaacaccgcaaaaaagcgatccacaacatctgcaggaaatatatcaggatattgttagtatgttgataaataaataagaacagaattaaccaatagcgggggatattaatcccccttatttcattgcgaaattcatttcgcgatgcgggttcgttataactgaatatccctgacatatcctcattaatttcaatgaggagggtatttctcaccctggagaaaataatgaagtatatagcaacatctgtagtggcaatgctgctcttatcgggttgtgataatacgcaaagtaacaattcatccccgtcagaaacagaagtcggcgttgttacgctcaaatctcaaccggtttcggtagtcagtgaattaaccggacgtaccagtgctgcgctcagtgctgaagtacgtccgcaggttgggggaattatccagaaacgcttatttaaggaaggtgatctggtcaaggctggacagcctctctaccagattgatgcggccagttatcaggctgcatggaatgaagcccgggcagcattacaacaagcacaggcactggtaaaagccgattgccagaaagcgcagcgttatacccgactggtgaaagagaacggtgtttcacaacaggatgctgatgatgctcagtctacctgtgcacaagataaagccagtgtagaggcgaaaaaagccgcactggaaactgcgcgcattaatcttgactggaccacggtaaccgcaccgatttcggggcgtattggcatttcgtcggtaacccctggcgcactggtgaccgcgtcgcaggatacagcgttaacgactattcgtggtctggatacaatgtatgtcgacctcactcgctccagtgtcgatttattacgtctgcgtaaacagtcactggcgaccaacagtgacaccatgagcgtctcacttattctggaagatggcacaacctacagcgaaaaagggcgtctggaactcaccgaagtcgcggtggatgagtctaccggttcggtgacattacgggcaattttccccaatccacaacagcagttattaccgggaatgtttgttcgcgctcgtgtcgatgaaggcgtgatggaagacgctattctcgcgcctcaacagggcgttacgcgcgatgctaaaggcaatgcaactgcgctggtggtgaataaagacaataaagtagagcagcgaacgctcgaaacgggagaaacgtatggtgataaatggctggtgctgaacggcctgcacaacggcgaccgactgattgttgaaggttctgccaaagtcacttcagggcagaccgtcaaggctgttgaagttcaggctaatggaggcaacgcctgatgttttcgcgcttttttgttcgccgcccggtctttgcctgggttatcgccattttgattatgttggcggggattctggctattcgcacattgcccgtcgcgcaatatcctgacgttgcaccgccgaccattaaaatttcagccacttatactggtgcttctgccgaaacgctggagaacagcgtgactcaggttatcgagcaacaactcactgggcttgataatttactctatttcagctcaaccagtagctctgatggttcggtcagtattaatgtgacctttgaacaaggtaccgatccagatactgcacaggttcaggtgcagaataaaattcagcaggcggagtcgcgcctacccagcgaagtgcagcaaacgggtgttacggtggagaaatcacaaagcaactttttgctgattgctgccgtgtatgacaccactgacaaagcctccagttcggatatcgccgactggctggtcagtaacgttcaggaccccctggcgcgtgttgaaggtgtggggagtctgcaagtctttggcgcggaatacgccatgcgcatctggctcgacccggccaaactggcgtcttactcgctgatgccttcagacgtgcaaagtgctattgaagcgcaaaacgtgcaggttactgccgggaaaataggggcattgccttcaccgaatactcagcaactgaccgcaacggtacgtgcgcagtctcgcttgcagacggtggatcagttcaaaaatattatcgtgaaaagccagtcagacggcgcagttgttcgtataaaagatgtggctcgcgttgagatgggcagtgaagattataccgctattggcaaacttaacggtcacccgtctgccggggttgctgtaatgctttcgcccggtgcgaatgcgctgaatacggcgacgctggtcaaggataagattgccgaattccagcggaacatgccgcagggatacgacatcgcatacccgaaagacagcactgaatttattaaaatctccgtagaggacgtaattcagacgctgtttgaagccatcgtattggtggtttgcgtgatgtatttattcctgcaaaacctgcgtgccacactgattccggcgttagctgtccccgtcgttttgctgggcacattcggcgttcttgcgttgtttggctattcgattaataccctgacgttgtttgcaatggtgctggcgatcggcttgctggtggacgatgccattgtggtggtagagaacgtcgaacgcattatgcgtgacgaagggttgcccgcgcgtgaagccacggaaaaatcaatgggcgagatttctggcgcactggttgccattgcgctggtgttgtcagccgtattcctgccgatggccttctttgggggatctacgggcgtaatttatcgtcagttctccatcaccatcatctccgcaatgctgctttccgtggtggtggcattgaccttgactcccgccctgtgcggttccgtcctccagcatgttccgccacataaaaaaggctttttcggcgcatttaaccgcttttaccgccgtactgaagataaatatcagcgaggcgtaatttatgtcctgcgccgtgcagcccgaacgatggggctttatgtcgtgctgggtggtggaatggccctgatgatgtggaagctgccgggcagtttcttacccactgaagaccagggcgaaatcatggtgcagtacacgctgccggccggggcgaccgctgcccgtacagcagaagtgaatcgccagattgttgactggttcctgattaacgagaaagcaaataccgatgtcatctttaccgttgatggtttcagttttagcggcagcggacagaacaccgggatggcgtttgtttcgttgaaaaactggtctcaacgtaaaggggcagaaaacaccgcccaggctatcgccctacgggctaccaaagagctgggcacaattcgtgatgccacggtatttgcgatgacgccgccagccgttgatgggctggggcaaagcaatggttttacgtttgaattgttagctaacggtggaaccgatcgtgaaacactgctgcaaatgcgtaatcagttgatagaaaaagcgaatcaaagtccggagttacattctgtacgcgccaatgatttgccacaaatgccgcaattgcaggtagatattgatagtaataaagcggtgtcattagggttgagtttgaatgatgtcaccgacaccctgtccagtgcgtggggcggtacttatgtgaatgactttattgaccgtggtcgtgtgaaaaaagtctacattcagggcgacagcgaatttcgttccgcgccgtcagacttaggtaaatggtttgtgcgcggtagcgataacgccatgacaccattctctgcttttgcgaccacccgctggctgtatggaccggaaagactggtgcgctacaacggctcggcagcctatgaaattcagggcgaaaacgcgactggctttagttccggcgatgcaatgacaaaaatggaggaactggcaaacagtcttcctgcgggaacaacctgggcctggagtggtttgtcattgcaggagaaactggccagcggtcaggcattaagtctgtatgcagtttctattctggtggttttcctctgccttgcagcactgtacgaaagctggtcagtcccgttctcggtcattctggtgatccctctggggcttcttggcgcggcgctggcggcctggatgcgtgatttaaacaacgacgtttacttccaggtagcgctattaactactatcggcttgtcgtcgaaaaacgccattctgattgtggaatttgctgaagcggcggttgcagagggctattccttgagtcgtgcggcattacgcgcggcgcagactcgtttacgcccaatcatcatgacctcgctggcgtttattgcgggggtaatgccgctggcgatagcaaccggcgcaggggcgaacagccgcatcgccattggtacgggcattattggcggcacgctgaccgctacattactggccattttcttcgttcctctgttttttgtactggtgaaacgtttgtttgccggtaaaccgcgccgtcaggagtaagttatgttgcgtcgttctcttatttttctggtgttgttgagtgcgggatgtgtctcgctcgatcctcactacagtacgcctgaatccccaatcccggcgaccttgccgggagcacagggccaggggaaggcaatcagccatgattggcagcaggtgatccacgatccccgattgcagcaggtagtaaccattgcactgaaccgtaaccgcgatgtgcaaaaagcgattgctgatattgactcagcacgggcgctctatgggcaaactaatgcgtcgttatttccgacggtgaatgcggccttaagttcgactcgcagtcgttcgctggcgaatggtacgggaacaactgccgaggctgacggcacggtgtccagttatacgctagatctgtttggtcgtaatcagagtttatctcgggcggcgcgggaaacctggcttgccagtgaatttacagcccagaacactcgtttaacgctgattgctgaaatcagcaccgcctggctgacactggcggccgataacagcaacctggccctggcaaaagaaacgatggccagtgcagaaaactcattgaaaattatccagcgccagcaacaggttggcacggcggcagcgacagatgtcagtgaggcgatgagtgtttatcagcaagcgcgcgccagcgttgccagctatcagacacaagtgatgcaggataaaaatgcgctgaacttactggcaggtacaacgcttgcggaaaatctgctaccgggaacactggaaagcctgccggaacaaatgataagtctggttcctgcgggagtatcatctgatgttctgctgcgtcgcccggatatccaggaagctgaacataatttgaagagcgccaatgcagatattggcgcggcgcgggctaactttttcccgacgatttcgctgactgccagtgccggtgttggcagtgacgcattgtcgtcgttgttcagccacggaatgcagatctggtcatttgcgccatcggtcacattaccgctgttcactggcggaagtaatctggcgcagcttcgttacgcagaagcacaaaagcgtgggctcattgccacctatgaaaaaaacgttcagagcgcatttaaagatgtcgctaacgcactggcgcggcggaccacgcttgaagagcaactggatgcacagcgccagtatgttaaagctgagcaacaaacggtcgatgttggcttgcgtcgctatcaggcgggtgttggtgattacctgaccgtgttgacggcgcagcgcagcttgtggagcgcacagcaggagctgctggcactgcaactgactgattttacaaaccgaatcacgctctggcagtcgctgggcggcggtatgtcatcactcaagtaaggaataatatggctagagtctctctttcatgggcattgattcttggtcttttagccggtatcggcccgatgtgtaccgatctttatttgccggctttgccggagatgtctgagcaactggcggcaaccacgaccataacgcaattaaccctgaccgcatcactgattggtcttggcgtcggacaactgttatttggccctctgagcgacaaaatagggcgtaaacgtccgttaatcttgtcgttgctattgtttattgtttcttccattttatgcgcgacaacgaacaatatttactggctggtggtctggcgttttattcaagggatcgcgggggcgggtggttcggtgctctctcgttctattgctcgtgacaaatatcagggagtaacgttgacccagttttttgcgctgttaatgacggtgaatggcctggcaccggtgttgtcgccagtgctgggcgggtacattgttagcacttttgactggcgcactttattctgggtaatggctgaaattagcaccgtactgttgctgggctgcctgttatttattaatgagaccttgccagaaaataaaaggggctcatcattgctattaaccggacgaagcgtggtgcagaaccgccgttttatgcgcttttgcctgattcaaagctttatgctggctggtttgtttgcatatatcggctcttcgtcgttcgtgttgcagaaggaatttggctttagtccaatgcaatttagcctggtgtttggccttaacggcatcggacttatcattgcttcatggatcttctcgcgcctggcgcgacggattaacgcgatgacattgttgcgaggtggcctgatagcggcaattttgtgtgcattgctcacggtcttatgcgcatggatacaattgcccattccggcactggtggcattatttttcaccatcgcattttgtagcggcatcggcactgttggcggggcagaggctatgagtgcagtagggacgcaggaatctggaacggcgtctgcgttgatggggatgagcatgtttgtcttcggcggtatagccgcgccattgtcgggaattggcggagaaacactgttaaaaatgagtctggcaattacggtgtgttatacgctggcattgctggttgctctcaccagaatcgacaatcaaaagtaatgaacacctcatcctgaggggggcctgtcaggatgaggtgcaaaacactaacggtccttacgccacgcatccgccgtcaatgcttcgccaaaatgaccggcgatcagccgtttggtgagttcatgcagcggcgatgccagcacatctgcggtgctgcctcgctcgacaacctcgccctgatgcatcaccagcacctggtcgctaatgtgcttcatcattccgatatgctgggtaacataaatatacgaaatgccctgtttttcctgtaactccagcatcagattaatcaactgcgaacgcatcgacatatccagtgaggcgagggcttcatcggcaataatgacttttgggcgcaatatcagcgcgcgcgccagacccagacgctgtttttgcccgggtgctaacatatgcggatagtaactgacgtgatccggtagcagcccaaccatacgcatcgtttcaataatctgtttgcgacgctgttccggttccaggtcggtgttcaggcgcagtggaaaatccagaatttgcgagatacgttgacggggattcaacgaggtggaaggatcctgaaaaatcatgcgaatacgctgactgcggaaggaataatcgccaaaatgcagcggatgatcgtcaatcaataactcgccgctggtaggttctatcattcccgccagcatttttgccagcgtggatttacccgaaccattctcgccgataatcgccagtgtctggccttcacgtagcgtaaagctcaagggttttaccgcttctacggtctgacgacgaaaccagccggtccggtagcggaacgttttacttaaattgcgcacttcaagtagcgtttcgatcatctcactctttctccatgttcagcgggaaatgacaggcatagagatgatttttcgcccccgtcaaacgtggcgtcacaatgcattctcgttgtgcatacgggcaacgtggccccagacgacaaccaatcggtaactgttccagcagcgggatagcgccgggcagcgtattgaggcgacttttatgcggcatcgcgctgccgaagtctggtatcgcgcggatcagcgcctgggtataaggatggtgtggcatcgtcaccaactccttactcggcgcggtttccaccgtttgaccgcagtaaagcacgttaattttatccgcccattggctaagcatttgtaagtcatggctgataagcaaaatagtggtattgctgttttggttgagacgcgtcagcaggcgaaagatttgcgcctgggttgttggctccattgagttggtcggttcgtcagcaattagcagacgtggttgattcgccagtgcaatggctatcatcactttctgacattcaccttcggtcaactcatagggaaaactgcgcatcgcatctttgtgatctttaatccccacgcggtgcagcagttcaatggcacggcgtttgcgccagccaaaacgctgccaccaacggcctttataggtccaggcagggatgttttgcatcaactggcgacccacacgttctgaagggtcaagacacgactgcggttcctggaaaatcatcgacacgttgtgaccaaccagcttgcgccgttcgcgtgcggagagacgcagcaaatcgatatcatcaaaacgcatacggtcagcagtaacacgccagttatctttattcaccccacaaatcgctttcgcaatcaaacttttgccggaacctgattcgccaacaagaccgcggatttcaccttcggttaaggtcatacttacgcggtcgacggctttaacccactcatcaccggttttaaattcaatggtcaggttacgaatatcgagtaatggcattattccacccccgcaataattgcacgacggacaccgtcgccaaggaggttaaccaacagcacgctaatcataattgccgcacctggcagcatgacagtccatggggcgacataaatcagttccagcgcatcaccgagcatcgcgccccattcaggcgagggcagttgtgcgccgaggtcaaggaagcccagcgcggcgatatcgagaattgccatcgacaatgcgcgagtgatctcggtgaccagtccggcggtgatgttgggcatcacagcaaaccagagaatattcagcgttgatgcgccatccagacgggcggcgataacgtactctttttccagttcgtcatgcaccatgctgtaaatcgaacgtaccatacgcggcagcaatgccagccagacagcaaacatggcgtgagacaaactcggtccggcaaacgctacaacgataattgccagcagcagcgaagggatcgccagtaaggtatccagaatatggttaagcaccgctgagcgtaggccgtgggtcgccccggcgaaggtgcccagtaccaggccacagatcgtcgcggcgagcgtcaccacaaatgcgccacctacggttggcgcagctccgctcagtaaacggcttaaaacatcgcgtccgaggtcgtcagtccccaggaagaaagaaacttcgccatagcgcgaccatgacggcggcaataattgataaccgagaaattgctggtcgatgccgtaaggcgcaaaccagccgccaaaaatacacagtacagccagccccgcgcagccgtacaggccgaccatcgcagaggcgtcactataaaatttgcgccaggcggtacgcagcgtgcccggcgggcgcttttcgctgtatacgctatcgtaaggcataccattccttatgtttcagagggttagccatggcacccaaaatatcagaaatcacgttaacaataatgaccagtgagccacacaccatcactccggcggaaatggctgcgtaatcctgctggcggatggcgttaattaaccagcgccctaaacccggccagctaaaaaccatttcggtgatcatcgccagcgtcagcatggtggaaaactgtaagcccaggcgaggaataaccggaggtaacgcgttatgcagaacgtggcgacgcaaaatagtaaagcgcgacaaaccgcgggttgccgctgctttaacatagttctggtcatacacttcgatagtgctgatacgcatcagtcggatcacttcagttgttggcgcaaccgacagggtgatcacgggcaatatcatatggcggattgcgctcatgaccatttcatcccgccacggtgagttcgaaagccaggcatcaatcaacgcaaaaccggtaatcggtttcacttcgtagagcaaatcgaaacgcccagaaacgggcaaccaacctagcgtgagtgaacaaaacagcgtcagcagaagcgccagccagaacaccgggattgaaaagcccagtaaggcgatggcgttgatcaagttatcctgccacttatggcgcgtaatcccggcaatcattcctacggggatgccaacaatcagcgcaaaaccgaaggcgaggatgcacagttccatcgtcgccgggaagacctcttttaactgttcggcaatcggttgaccgttaatgctggaaacaccaaaatcccagtggatcaggccgttaaaccagaacacccaggcattccacagtgacgcgccttgtaacggcgcatgtggggtgaaatagctcaagctgaagccaacgaaggtcagcaggaacaaggtcacaatcaataacaaaatacggcgtaaggtgaagataatcatggctttttcacctcatcctgtttctcgcgatacaccccagcaaaggaggcgttaccaaacgggctaagtaccagacctttgatatcgtaccgataggcctgcaaacgcaatgacgacgccagcggcagaataggtaattcctgcgccagaatactttgcgcttcgtcataggcttcaatacgcgccgccagctgctgcgaagagagcgccttacgcaatacgctgtcgaatttcggatcgcaccagtgggcgaggttggtctgcgaatgaattgctgcgcagctcagtaacggacggaagaaactgtccgggtcgttactgtccgtcgcccaaccggataacgtcagatcatggctcatatccatcaaccgcgcctcctgaaaacgaccttctaccggcacaatcaccacttttacgccaacctgtgccatatccgcctgaatcagttcggcggttttcagtggactggggttccacgcctgcgaacgtgtgggcacccacagtttcagcgttaagttttccagccccaacgccttcaactgttcgcgcgattttgccggattgtattcagtaattttagcctcgttgtcataggcccacgaggctcgcggtaaaatagaggccgccgtttcagccgtaccataatagatggattgcatcaggcgctggttattaatcgccagtgccagcgcatggcggaccgccggattatttagcggcggtttggcggtgttgaatgccagataggcgacattcatcccaggacgcagcgttaaacgcaagcgtgggtcgtcacgcaaaatggatagctgactggcagcaggccaggccagaacgtcgcactccccggtcaggagtttcgacaatcgtcctgtaccgccagagcctaaatccaccaccacttgtggcatcaacggcttaccacgccagaaatcatcatgacgttgtaagcgaatatattgcccggcgcggtattccgacaactgatacggaccggtgccgaccggttgacggtcgagttgctcctggcgatcttctttctctaacttccctgcatattctgccgacatgaccgaagcataatgggtcgccaggtgccacaaaaaagaagcatccggctgggcgagacggaactcaacggtatgattatccagcttgcggacgcttttcacgttatcggcaaattgcagactgtcgaaataggggaagttactgccgttgacgttatgccacgggttgttgcggtcaaaaatccgttggaaggtaaacaccacatcatcggcattcattttacgagtgggagtaaaccagtcggttttttgaaacggaacatcgcgacgcaggtggaagcgataggtcgcgccgttgtcgagtacttcccagctttcggcaagttccggcatcaggcgataggtatagggatcgacatccagcagtcgatcataaaactgggcggcaagggtatcgacaattaacccactgctcgctttggatgggttaaaggtgttgacttgcccgctgacgcaatagacaaaaccgctgtcgcggatatcagcatgcgggggggattcaggcgcggcgattgcctgaccactcacaagtccagcaatcaccaaaagagacgataatacctggcgcataatattaagggattttatgtaaagaggctatcttactaatatttaatgacatttgccattaccgtttgtgttcagaggtcgtaatgagggccgtgtggttggtcattgaacaggtggcgtcgccatcagttcaacattcgtacccgtgatttctttataactataactcacagaacaacttagcgaggagcatagcggtacgatcgtgagaaacccattaaagcatgctgcagtgcgtgtcatttttagccggatgcggcgcgaacgctttatccgggcaacgatactgaccgatagtctgcaattaaataattactcattaccccattgattcaaaaactctgcgatctcatcaatgcgtacgggattaatccccgcttcagcagccatttcatgttgggcttcttcactgatctcttcattattcatcaaacgggtgagcagtaactggaagtagtgggccagcggtgtgcgttcagcgtctgcgacaggctctgcgcattcggtcgcgtactcatcggcaatatcaaaatattttagcgggatatcgtggttcattatttgcccctggggttaatgcgctaagcataaaggcggatgatagcactcgtgatccgggtcatacatatttttatagttaatggcgcggtgcattaccctcaggcaggataatgcgccgcgcattcgactattacgtttcgctcaccggcgttctgtcgccatcatacaacggcactttgcgatagcggcggatcaaataccacaaatatgcgccgcctaacgaagcccataccatcccggttgcgcaattcgatgcggcaatgaaaattttgcaggatgcgctgagagattaatacgcagaagcagggttaacgcaataatgcctgatgcgcagcgcttatcaggcctgcaaacgacgtattgattatgtatgccggataaagcgttcacgctgcatccggcaagttgtattgcccaacttcgctaaatctggtgctttttcaacaacgcgcggaactgatgataggttaaccccagcaattcagcggcgcgcttctggttatatttcccctgttgcaaactgagttgcagcaactctttttcctgctgcatctgaaactcgcgtaaatccagtggcagcgtcggaagcgaggtgttttctgaaacggcgatggcttcttcagatggacggcgtttaaagggatcaataatgatgtcatcaagcggataatcgctggtgccgtgacgatacactgaacgttccaccacgtttttcaattcacgtatatttcccggccagcgataattcagcaatgtttctctggcgtgctctgtaaaacccgggaacagaggcagcttgatttcccgacacatctggatggcaaagtgttctgccatcaacataatgtcgctttcacgctcgcgcagtggtggcagttgcactacatcgaaagccagccggtcgagcaggtcagctcgaaaagtaccttcattgaccatcgccgggagatcggcattcgtcgcgcataccaaccgcacattcacctgcaatggctggctgccgccgacgcgctccagttcaccgtactcaatcacacgcaataatttttcctgcaccatcatcggtgccgtagcgagttcatcaaaaaatagcgtaccgccgtcggcacgttcaaatctccctggatgacgtttttgcgcaccggtaaacgcccccgcttcgtgaccaaacagttcggaatccaacagattttcatttaacgccgcgcagttaagggaaataaacggcccttgccaacgggaggagagataatgcaggcggctggcgatcagctctttaccggtgccgcgctcgccgatgatgagcaccggtttgtccagcggtgcgagatgcgaaacctgttccagcacttcgagaaagctgttcgcctcaccgagtaaattatctttgtattctgccatgatgaaattcgccacttgttagtgtaattcgctaattcatcctggcatgttgctgttgattcttcaatcagatctttataaatcaaaaagataaaaattggcacgcaaattgtattaacagttcagcaggacaatcctgaacgcagaaatcaagaggacaacattatgggtattttttctcgctttgccgacatcgtgaatgccaacatcaacgctctgttagagaaagcggaagatccacagaaactggtgcgtctgatgatccaggagatggaagatacattggttgaagtacgttctacttcggcgcgtgcgctggcagaaaagaaacagctgactcgtcgtattgaacaagcgtcggcgcgtgaaattgaatggcaggaaaaagcggaactggcactgctgaaagatagagaggatctggcgcgtgcggcgttaattgaaaaacagaaactgaccgatctgattaagagcctggaacatgaagtgacgctggtggacgatacgctagtgcgtatgaagaaagagatcggcgagctggaaaacaaattgagcgaaacacgcgctcgccagcaggcattgatgttacgccatcaggcggcaaactcgtcgcgcgatgtgcgtcgtcagctggacagtggcaaactggatgaagcaatggctcgtttcgaatctttcgaacgccgtatcgaccagatggaagcggaagcagaaagccacagcttcggtaaacaaaaatcgctggacgatcagtttgccgaactgaaagccgatgatgcaatcagcgagcaactggcacaattaaaagccaaaatgaagcaagacaatcaataataacatccaggcggcgtccgaacgcgccgccgctcatcgtctaaggagtacttatgagcgcgctatttctggctattccgttaaccatttttgtgctgtttgttttaccgatctggttatggctgcattacagcaatcgttctggtcgcagtgaattgtcgcaaagtgagcagcagcgattagcgcaactggctgatgaagcaaaacggatgcgcgaacgtattcaggcgctggaatccattcttgatgcagaacatccgaactggagggatcgctaatggcgggcattaatctcaataaaaaattatggcgtattccacagcagggcatggtccgtggcgtctgcgccgggattgccaactattttgatgtaccagtaaaactggtgcgtatcctggtggtgctgtcgattttcttcggtctggcgctgtttaccctggttgcttacatcattttgtcatttgcgcttgatccaatgccggacaacatggcctttggtgagcagctaccttccagcagtgaattgctggatgaagtcgaccgtgaactggcggcaagtgaaacgcgtttacgcgagatggaacgttatgtcacttccgatactttcacgttacgtagccgtttccgtcaactgtgaggaaagttatgaatactcgctggcaacaggccgggcaaaaggtgaagcctggtttcaaattagcaggcaagctggtacttcttaccgcgctgcgctatggcccggcgggtgtagctggctgggcgataaaatcagttgctcgccgaccactgaaaatgttgctggctgtggcgctggaaccgctgttaagtcgggctgccaataaactggcgcggcgttataaaaggtgaggggaatttcgcaaaaattgttaaagctaaggcgtattatggatggcaattttcatccatagaaggacgcttacatgtttaaaaaaggcttacttgctctgacactggtgttttcactgcccgttttcgccgctgaacactggatcgatgttcgtgttccagagcagtatcagcaagagcacgttcagggagccatcaatattcccctgaaggaagtgaaagagcgcattgccaccgccgttccggataaaaacgacaccgtgaaagtgtattgcaatgccggacgccagtcagggcaggcaaaagacatccttagcgagatgggatatacccacgttgagaacgccggcggcctgaaagacatcgcaatgccgaaggtcaaaggttaaaagaatccaccctaagcggcgcttatgcgccgtttactttttctgtcacaccttatttacatccccatagattatttgcgtcagctcacaaatacgctttttcccaggtaaaaaaagatttcctgcgtgactaaaccccttgagctcaattgacagtttattttatgcggagtagtctctcgtttcatgggaccgctaccacggaaaggcaacatgaaacagaaaattacggattacctggacgaaatctacggtggaacatttaccgcgactcatttacagaaacttgtaacgcgtcttgagagtgcgaaacgattaattacacagcgacgtaaaaaacactgggatgaaagtgatgtcgtgttaattacctatgccgatcaatttcacagtaatgatttaaagccactacccacatttaatcagttttaccctcaatggctgcaaagaattttttcacatgttcatttattacctttttatccatggtcatctgatgatggattttcggtaattgattatcatcaggtcgccagtgaagcgggggagtggcaggatattcagcaactcggtgaatgcagccatttaatgtttgattttgtctgcaaccatatgtcggcaaaaagtgaatggtttaaaaactatttacaacagcagccaggttttgaagatttttttattgccattgatccgaaaaccgatctcagcgccgtcactcgcccgcgtgcgttaccgttattaacgccattccagatgcgcgatcattcaatgcgccatttatggaccacctttagcgacgatcaaattgacctcaattaccgtagccctgaagtgttgctggcgatggtggatgtattgctgtgctacctggaaaagggcgcagagtatgtccgtctggatgccgttggctttatgtggaaagagccgggaacaagctgcatccatctggaaaaaacacatctgattatcaaactgttacggtcgattattgataacgtcgcgccaggcacagtgatcattaccgagaccaatgttccgcataaagacaacattgcttactttggcgaaggcgatgacgaagcgcatatggtgtaccagttctcgatgccgccgctggtgctgcatgcggtgcaaaaacagaacgttgaggcactttgtgcgtgggcgcaaaacctgacactaccttccagcaacaccacctggtttaacttccttgcctctcacgatggcatcgggcttaacccactgcgggggttgttgcccgaaaacgaaatattagcgctggtcgaggtgttacagcaggaaggggcattagtaaactggaaaaataatcccgacggtacgcgtagcccctatgaaatgaatgtcacctatatggatgcgttgagccgccgtgagtgtagcgacgaagaacggtgtgccaggtttattctcgcccatgcgattttgttaagttttcccggtgtgccagcgatatatattcaaagcattctggggtcgcgtaatgattacgcaggtgtcgaaaaacttggatataatcgcgcgattaaccgtaaaaaatactctagtaaagagataacgacagaactgaacaataaagcgacattaaggtattcgatatattataagttgtcgcatttaattacacttcgtcgcagtcataaagagtttcatccggataataatttcaccattgatgcgattaattcatttgtaatgcgaattcaaagaagcaatgcggatggcgattgcctgacgggattgtttaatgtcagtgaaaatattcagcatataaatattactgacctgcacggtcgggatctgattagtgaagttgatatattgggtaatgaaataacactgcatccctggcaggttatgtggattaaataaaaaggaacatttcatgattaaatcaaaaatcgtgctgttatcagcactggtttcctgcgccctgatttcaggctgtaaagaagaaaataaaaataatgtatccatcgaatttatgcattcttcggtggagcaggagcgccaggccgtcatcagcaaattgattgcccgttttgaaaaagaaaacccaggtatcaccgtaaaacaagtgcccgtggaagaagacgcctataacaccaaagtcattaccctttcacgtagcggttcgctgccggaagtgatcgaaaccagccatgactacgccaaagtgatggacaaagagcagcttatcgatcgccaggcggttgccacggtcatcagcaacgtcggtgaaggcgcgttctacgatggcgtactgcggattgtgcgcaccgaagatggcagcgcctggaccggtgttcctgtcagcgcatggattggcgggatctggtatcgcaaagatgtgctggcaaaagctgggctggaggagccaaaaaactggcagcaattgctggacgttgcacagaaactgaatgacccggcgaataaaaaatacggtattgcgctgcctacagcagaaagcgtgttgacggaacagtctttctcccagtttgcgttatccaatcaggctaacgtctttaacgccgaaggcaaaatcacccttgatacaccagagatgatgcaggcgctgacctattaccgcaaccttgctgccaacaccatgccaggttctaacgacatcatggaagtgaaagacgcttttatgaacggcaccgcgccgatggcgatttactccacctatatccttccggctgtgattaaagaaggcgatccgaaaaacgtcggtttcgtggtgccaaccgagaaaaattctgcggtctacggcatgttgacctcgctgaccattaccgccgggcaaaaggccgaagagacggaagcagcagaaaaatttgtcacctttatggagcaggcggacaacattgccgactgggtgatgatgtcgccaggcgcggcgctgccggtgaacaaagcggtggtgactaccgccacctggaaagacaacgacgttattaaggcgctgggagaattgccgaatcagctaatcagcgaactgccaaatattcaggtctttggcgcagtaggggataaaaactttacccgcatgggcgatgtgacggggtctggcgtggtgagttcaatggtgcataacgtcaccgtggggaaagccgatctccctggcacgctgcaagcgagccagaaaaagctggatgaactgatcgaacagcactaaacccaggacaggaatccgcaatgaacaggcttttttcaggtcgttccgatatgccttttgcactgctgcttctcgcgcccagcttattactgctgggcggtctggtggcgtggccgatgctgtcgaatatcgaaatcagttttttacgtctgccgctcaatcccaacatcgagtcaacgtttgttggggtaagcaactacgtgcgtattctctccgatcccggcttctggcactcgctgtggatgacggtctggtataccacactggtggtggcgggcagcaccgtgctcgggctggccgtggcgatgtttttcaaccgcgagttccgcctgcgcaaaaccgcgcgttcgctggtgctcctctcctacgtaacgccgtctatttcgctggtgttcgcctggaaatacatgttcaacaacggttacggcattgtgaactacctcggcgtcgatcttctgcatctctatgagcaggcaccgctgtggttcgataatccgggcagtagctttgtgctggtggtgctgttcgccatctggcgctacttcccctatgcctttatttcgtttctggcgattttgcagaccatcgacaaatcgctgtacgaagcggcagagatggatggcgcgaatgcctggcagcggtttcgcatcgtcacgctgcccgcgattatgccggtcctggcgacggtggtgaccctgcgcactatctggatgttctacatgttcgcggatgtttatctgctgacgaccaaggtcgatattctcggtgtctatctctacaaaaccgcctttgcctttaatgacttagggaaagcggcggcgatctcggtggtgcttttcatcattattttcgctgtcattctgctgaccaggaaacgggtgaacctcaatggcaacaaataaacgcacactcagtcgaatcggtttttactgcgggctggcgctgtttctcatcatcacgctgtttccattttttgtgatgctgatgacctcgttcaagagcgcaaaagaggcgatctcgctgcatcctacgctgctgccacagcagtggacgctggagcattacgtcgacatttttaatccggtgattttcccgtttgtcgactacttccgtaacagcatggtggtgtcggtggtttcatccgtggtggcggtatttctcggcattcttggggcttacgcgctttcccgcctgcgctttaaagggcggatgaccatcaacgccagcttttacacggtgtacatgttctccggcattttgctggtggtgccgctgttcaaaatcatcaccgcgcttggcatttacgacactgagatggcgctgatcatcaccatggtgacgcaaactctgcctaccgccgtgtttatgctgaaaagctacttcgacaccatccccgatgaaatcgaagaagcggcaatgatggatggcctcaatcgtctgcaaattatcttccgtatcaccgtgccgttggcgatgtcggggctgatctccgtgttcgtctactgctttatggtggcgtggaacgactatctctttgcgtcgattttcctctccagcgccagcaatttcactttaccggtaggcctgaacgcgctgttcagtacgccagattacatctggggacggatgatggcggccttgctggtgaccgcattgccggtggtgattatgtacgcgctttctgaacgttttattaagagtggtttgaccgccggtggcgtgaagggataaagcggccagtttctttacaaggagttttacatgaaaaagttagtagccacagcaccgcgcgttgctgcgctggttgagtatgaagatcgggcgatttcagccaatgaagtgaagatccgcgtgcgattcggcgcgccgaaacacgggacggaagtggttgatttccgcgccgccagcccgtttattaatgacgactttaatggcgaatggcagatgttcaccccgcgtccggcagatgcgccgcgcggcattgagtttggcaagttccagcttggcaacatggtggttggcgacattatcgagtgcggcagcgacgttaacgactacgcggtgggcgacagcgtatgcggctacggcccgctctccgagacggtcatcattaacgcagtgaataactacaagctgcgcaaaatgccgcaaggcagctcctggaaaaacgccgtctgctacgacccggcgcagtttgccatgagcggcgtgcgcgatgccaacgtacgcgtaggggattttgtcgtggtggtcgggcttggcgcgattggtcaaattgccattcaactggcaaaacgcgctggcgcgtcggtggtaattggcgtcgatcctattacccgtcgttgtgatattgcccgtcgccacggtgcggatttctgtcttaaccccattggcgctgacgtaggtaaagagatcaaaacgctgaccggcaagcagggtgccgatgtgattatcgaaaccagcggttacgccgacgcgctgcaatcggcgctccgcggtctggcctacggcggcaccatctcctatgtcgcgtttgccaaaccatttgctgaaggttttaacctcggacgcgaagcgcatttcaataacgccaaaattgttttctcccgtgcgtgcagcgagccgaacccggattatccgcgctggagccgcaaacgtatcgaagaaacctgttgggaactgctgatgaacggttatctcaattgtgaagatttaatcgacccggtggtgacctttgccaatagcccggaaagttacatgcagtatgtcgaccagcatccggaacagagcatcaaaatgggcgttacgttttaattcaaaggaatgaaaaaaatgaaaatcggcacacagaatcaggcgttctttccggaaaacattctggagaaatttcgttatatcaaagagatgggtttcgatggttttgagatcgacggcaaactgctggtcaacaatctcgaagaagtcaaagcagcaatcaaagaaaccggtttaccggtgaccaccgcctgtggtggctatgacggttggattggcgactttatcgaagagcgtcgacttaatggcttaaagcagatcgaacgcattcttgaagcgctggcagaagtgggcggtaaaggtatcgtcgttccggctgcatggggcatgtttaccttccgcttaccgccgatgacctcgccgcgtagcctggacggcgaccgcaaaatggtgagtgattccctgcgcgtactggaacaggcggccgcacgtaccggaaccgtggtgtacctcgaaccgttaaaccgctatcaggatcacatgatcaacaccctcgccgatgctcgtcgttacatcgtcgaaaacgatcttaaacatgtacagattatcggcgatttctatcacatgaatatcgaagaagataacctggcgcaggcgttgcacgacaaccgcgacttgctcggtcatgtgcatattgccgataaccatcgttaccagccgggcagcggcaccctcgatttccacgcgctgtttgaacagctgcgcgccgataactatcagggttatgtggtgtatgaagggcgtatccgggcagaagatcctgcccaggcgtaccgtgattctttggcctgggtgcgtacctgctaagaggtctttgtgaaaagtgcaatgacaagctctccgctgcgagtcgcgatcataggcgcgggccaggtggcggataaagttcatgcttcgtactactgcacccgcaacgatctggaactggtggctgtctgtggcagccgcctttcccaggcgcaggcgctggcagaaaaatacgggaatgcatccgtgtgggacgatccgcaggccatgctgctggcggtgaaacctgatgtggttagcgtctgctcacctaaccgttttcattacgaacataccctgatggcgctggaagcgggctgccatgtgatgtgcgaaaaaccgcccgccatgacgccagaacaggcgcgggaaatgtgcgataccgcgcgcaaacagggcaaggtgctggcctacgactttcaccatcgttttgcactcgatacgcaacagctgcgtgaacaggtgaccaacggcgttttgggagagatttacgttaccaccgcccgcgccctgcgtcgttgcggtgttcccggctggggtgtctttactaataaagaattgcagggcggaggcccgctgatcgacatcggcattcatatgctggatgcggcgatgtatgtgctgggttttccagcggtgaaaagcgtgactgcgcatagctttcaaaagatcggcacgcaaaagagctgcggtcaatttggcgagtgggacccggcaacctacagcgtcgaagattcgctgtttggcaccattgaatttcataacggcggcattctgtggctggaaacgtcatttgcactcaacatccgcgaacagtcgattatgaacgtcagcttttgtggtgataaagccggggcgacgctgtttccggcacatatctacaccgataacaacggtgaattaatgacgctgatgcaacgggaaatggcagacgacaaccgtcatctgcgcagtatggaagcctttatcaaccacgtacaaggtaagcccgtgatgatagccgacgccgagcagggatacatcatccagcaactggtggcgacgctttatcaatccgcagaaacagggacgcgtgtggaattatgatcaggccagtaacgttaacggaaccccatttcagccagcataccctgaacaagtatgcttcgctgatggcgcaggggaacggctatcttgggcttcgcgccagccatgaagaagattacacgcgccagacccgtgggatgtatctggcagggctttatcatcgggcgggtaaaggtgaaatcaacgaactggtgaacctgcctgatgtcgtggggatggagattgccataaatggtgagattttctcgttatcccgcgaagcatggcagcgtgagcttaactttgccagtggcgaattacgccgcaacgttgtctggcgtaccagcaacggcgcaggttacaccatcaccagccgtcgctttgtttcggcagaccaactgccgctcattgcgctggaaatcactattacgccactggacgccgacgcgttagtgctgatttcaacaggcattgacgccacgcaaaccaaccacggtcgccaacatctcgacgaaacccaggtgcgggtatttggtcagcatctgatgcaggggatctacaccacccaggatgggcgcagtgatgtggccatcagctgttgctgtaaggtgagcggtgatgtgcagcaatgctataccgccaaagagcgccgtttactgcaacatacctgcgcgcagcttcacgcaggtgagacgctgacgctgcaaaaacgggtgtggatcgactggcgggacgacagacaagccgctttagacgaatggggcagtgcgtcgcttcgtcagcttgaaatgtgcgcgcagcagagttacgaccaacttcttgcagcatcaacagaaaactggcgtcaatggtggcagaaacgtcgtatcacggtaaacggcggcgatgcgcacgatcagcaagcgttagattatgcgctttatcacctgcgcatcatgacgcctgcccacgatgagcgcagcagcattgcggcgaaaggtttaaccggcgaaggctacaaaggccacgttttctgggatacagaagtatttttgctaccgttccatctgtttagcgatccgacggttgcccgaagtttactgcgttatcgctggcacaacttgcctggcgcgcaggagaaagcgcgacgcaacggctggcagggcgctctgtttccgtgggaaagcgcgcgtagtggcgaagaagagacgccggaatttgccgccattaacattcgtaccgggttgcggcaaaaagtggcctctgcgcaggcggaacatcatctggtggccgatatcgcctgggcggttattcaatactggcggaccacgggggatgaaagtttcattgctcatgaaggcatggcgctacttctggagacggcaaagttctggattagccgcgcggtgagggttaacgaccgtctggaaattcatgatgttattgggccagacgaatataccgaacatgtcaataataacgccttcaccagctatatggcgtattacaacgtccagcaggcgctgaatatcgctcgtcagtttggctgtagcgacgacgcgtttattcatcgtgcagaaatgtacctcaaagaactgctgctgccagaaattcagcccgacggcgttttgccgcaggatgattcgtttatggctaagccggtgattaatctggcgaaatacaaagcggcggcggggaagcaaaccattctgctggattattcacgcgcagaagtgaacgagatgcagatcctcaaacaagctgatgtggtgatgctcaattacatgctgccggagcagttctcagcggcatcgtgtcttgccaatctgcaattttatgaaccgcgcactattcacgactcgtcattaagtaaagcaatccacggcattgttgccgcacgctgtggcctgctgacccaaagttatcagttctggcgcgaggggactgaaatcgatcttggtgctgatccacatagctgtgatgacggtatccacgctgccgcaactggcgctatctggctgggggcgattcagggttttgccggggtgagcgtgcgtgacggtgaattacatctcaatccggcgttacctgagcagtggcaacagttgtctttccctctgttctggcagggctgcgaattacaggtcactctcgacgcgcagcgtattgcgattcgaacttctgcgcccgtttcactgcgcttgaacggtcagcttatatctgtggctgaagaatctgttttctgtttgggggattttattttgcccttcaatgggaccgctaccacgcatctggagggtgaatgaaactgcagggggtaattttcgatctggatggagtaatcacagataccgcgcatctgcatttccaggcgtggcagcagattgccgctgaaattggcatcagcattgatgcgcagtttaacgaattcctaaaagggatcagccgcgatgagtccctgcggcgaattctgcagcacgggggtaaagagggcgattttaacccacaggaacgggcgcaactggcgtatcgcaaaaatctgctttacgtccactcactgcgcgaactgacggttaatgctgtgctgcctggcattcacaatttgctggtagatctccgagcacagcagattccggttgggctggcttctgtctccctgaatgcgccgacgattttagcagcgctggagctgcgcgagtttttcaccttctgcgcggacgcttcccaactcaaaaattcgaaaccggacccggaaatctttctcgccgcctgtgcagggctgggcgtgccgccacaggcatgtatcggcattgaagatgcgcaggcgggcattgaagccattaacgccagcggtatgcgctcggtggggatcggcgcgggcttaaccggggcgcaattattgttgccctcaacggactccctgacctggccgcggttatcggccttctggcaaaacgtatagcaaaggaatcaacatggcacagctttcgttacaacatattcaaaagatctacgataaccaggtgcatgtggtgaaggacttcaacctggagattgccgataaagagttcatcgtgtttgtcggtccgtcgggctgcggtaaatcgaccaccctgcgtatgattgccgggcttgaggagatcagcggcggtgatctgttgatcgacggcaaacgaatgaatgacgttccagccaaagcacgcaatatcgcgatggtgttccagaactacgcgctgtatccgcatatgacggtctacgacaacatggcgtttggcctgaagatgcaaaaaatcgccagagaggtgattgatgagcgggtgaactgggcggcgcaaattctcggcctgcgtgagtacctgaaacgcaagccgggcgcgctttccggcgggcaacgtcagcgagtggcgcttgggcgggcgattgtgcgcgaagcgggcgtgtttttaatggatgagccgctctctaacctggatgccaagctgcgcgtgcaaatgcgcgcagagatcagcaagctgcatcagaaactgaacaccaccatgatctacgtgacccacgatcagaccgaagcgatgaccatggcgacgcggattgtcattatgaaggatgggattgttcagcaggtcggtgcgccgaaaacggtttataaccaacctgcgaatatgtttgttgccggatttattggatcaccagcgatgaattttattcgcggcacgatcgatggcaataaattcgttacggaaacgcttaaattaaccatacccgaagagaaattagcggttctgaaaacacaggaaagtttgcataagcccatcgtaatgggaatacgcccggaagatattcatccggacgcgcaagaggaaaataacatttccgccaaaattagcgtggcggaattaaccggtgcggaatttatgctctacaccacggttggggggcacgagttagtggtccgtgctggtgcgttaaatgattatcatgcaggagaaaatatcactattcattttgatatgactaaatgtcatttctttgatgcagaaacggaaatagcaatttgctaaatacagggggaaggcattctcccaggataatacaaggaacaataatgaaaaagttattactctgtaccgcactggtgatgtgtgcgggaatggcctgcgcacaggccgaggaaaagaacgactggcactttaatatcggcgcgatgtacgaaatagaaaacgtcgaaggttatggcgaagatatggatgggctggcggagccttctgtctattttaatgccgccaacgggccgtggagaatttctctggcctattatcaggaagggccggtagattatagcgcgggtaaacgtggaacgtggtttgatcgcccggagctggaggtacattatcagttcctcgaaagcgatgatttcagtttcggtctgactggtggtttccgtaattatggttatcactacgttgatgaaccgggtaaagacacggcgaatatgcagcgctggaaaattgcgccagactgggatgtgaaactgactgacgatttacgtttcaacggttggctgtcgatgtataaatttgccaacgatttgaacacgaccggttacgctgatacccgtgtcgaaacggaaacgggtctgcaatataccttcaacgaaacggttgccttgcgagtgaactattatctcgagcgcggtttcaatatggatgatagccgcaataacggtgagttttccacgcaagaaattcgcgcctatttgctgctgacgctcggcaaccactcggtgacgccgtatacgcgcattgggctggatcgctggagtaactgggactggcaggatgatattgaacgtgaaggccatgattttaaccgtgtgggtttattttacggttatgatttccagaatggtctttccgtttcgctggaatacgcgtttgagtggcaggatcacgacgaaggcgacagcgataaattccattatgcgggtgttggggtgaattactcgttctgataatgtgctaaattgccggatgcggggcgagcgccaaatccggcatacatttatttcaacgacatatgcgtagcaacggtaatattttgtggtgacggttttccggcaattagctggaataataactcgcagctttgttgacctaactcctgcgtcggaacatcgatgccgcctggtgcaggcgttaatataaacgacagcgtttcattactataacccaccaccgctaactgctgcggaatagcaatgtttttctctgccgccgcacgataaatactcattaatttcaggctgtcagtagcaaacactgcctcaggcaacggtgactggcttaataattcccgtgctgcttttaatgctgtctcatgggtataaccgccgtcaacaatccattcatcacgcactgcaatattatgcgtagccaggctttgcttataaccatttacccgatccactgaaacatgaacatcaagcggcgcatgcaggcatgcaatattcttatgcccgctttcaattaacgcatcggttagcgcaatactgtcgccataattatcggtatcgacggaataaacatggctgtattgaccttcaactttaccgatcaccaccaccgggatctcgtatttgtcgagttgtgcaaagaaggattcatcggcaggcgaacttagcataataatgcctttaatcattttctgcttaattttgctttcgcatttttgcagatcttctgctggattgtgcgacgtttgtaatatcacgtcgaaaccttcttcttccgctttggcggtgatggcatgcaaaacttcagagaaaaacggattacccgccgtagttttggtcgaacgggtagaaatcaccataatggcatcaaaacccgaagaggtcagcgcgcgggccagcttgtttggttgatactgtaattcttcaatggcccgtaacactttttcgcgcgcttccggggagatattggtttgcttattcagcacgcgtgatacggtggattttgatacgcctgcaaccctggcaatatcataaatagtaggggacataggtcaggaactccgtccgaacgtgaatgctgcacatcttatggagttcgcccgtcgatgacaacacgggtagttgataatcaatggcctggcccccacattcatattcttacgaacgattttttttctggtcttcagagcagcacaggacagcaatgaagcgacttaaaaatgaactcaatgcgctggtgaatcggggtgtcgacagacatctgcgcctcgctgtaaccggacttagccgcagcggcaaaacagcgtttatcaccgcgatggttaatcagttgctcaatattcatgccggagcacgtttgccgcttttaagtgcggtgcgtgaagagcgcctgctgggcgtaaaacgcattcctcagcgtgactttggcattccgcgcttcacctatgatgaaggactggcgcagttatatggcgatcctcccgcctggccgacgccaacgcgcggcgtcagcgaaattcgcctggcgctacgctataaatcgaacgattcgctgctgcgccactttaaggacacctccacgctgtatctggagattgtggattaccccggcgaatggttgctcgacctgccgatgctggcgcaggactatttaagctggtcgcgccagatgacgggcttactcaatggtcagcgcggcgaatggtcggcgaaatggcgaatgatgtgcgaagggctggacccgctagcgcctgccgacgaaaaccgactggcagacattgccgccgcgtggaccgattatctccaccactgcaaacagcaggggctgcactttattcagccaggacgctttgttttgcctggcgatatggcaggagcgcccgcgctgcaattcttcccatggccagatgtcgatgcctggggcgagtccaaactggcgcaggccgataagcacaccaatgccggaatgttgcgcgagcgttttaattattactgcgagaaagtggtgaaggggttctataagaatcacttcctgcgttttgaccgccagattgtgctggtggactgcctgcaaccgctcaacagtggaccacaggcatttaatgatatgcgtctggcgctgacgcagctgatgcaaagtttccactacgggcagcgtaccctgttccggcgtttgttttcgccggttatcgataagctattgtttgctgccactaaagcggaccatgtgaccatcgatcagcacgccaatatggtttcattgctgcaacaactgattcaggatgcctggcaaaatgcggcgttcgaagggatcagtatggactgcctggggctggcgtctgttcaggcgaccaccggcggaattattgatgttaacggtgagaaaatcccggcgctgcgcggtaatcgactcagcgatggcgcaccgctcactgtttatcctggcgaagttcccgcacgtttgccaggtcaggcgttctgggataagcaaggcttccagtttgaggcgtttcgtccgcaggtgatggatgtcgacaaaccgctaccgcatattcgtcttgatgctgcgctggaatttttaataggagataaattgcgatgaccgaaccgttaaaaccacgtattgatttcgacggtccactggaggtcgatcagaatccaaaattcagggcgcagcagacctttgacgaaaatcaggcgcaaaattttgccccagccacgctcgatgaagcgcaggaagaagaggggcaagttgaagcggtgatggacgcagcgttacgtccgaaacgcagcctgtggcgcaaaatggtgatgggcgggctggctctgtttggcgcaagcgttgtcgggcagggcgtgcagtggacaatgaacgcctggcaaacccaggactgggtggcgctgggtggatgtgccgctggggcattgattatcggcgctggcgtaggttctgtggtaacagagtggcggcgcttatggcgcttgcgacagcgcgcccatgaacgcgacgaagcgcgcgatttgttgcacagtcacggcacgggtaaaggccgtgcattctgcgaaaaactggcgcagcaggcgggcatcgatcagtcacatccggcgctgcagcgctggtatgcctcaatccatgaaacgcagaacgatcgtgaagtggtcagcctgtatgctcacctggtccagccagttttagatgcccaggcgcggcgcgaaatcagccgctcagcggcggaatcaacgttaatgattgccgttagcccactggcgctggtggatatggcgtttatcgcctggcgcaatctgcgtttgattaatcgcatcgccacgctgtatggcattgaactgggatattacagccgtttgcgcctgtttaagctggtattgctgaatattgcttttgccggagccagcgaactggtgcgcgaagtggggatggactggatgtcgcaagatctcgctgcgcgtttgtctacccgcgcagctcaggggattggtgctggacttctgacggcacgactggggattaaagctatggagctttgccgcccgctgccgtggattgacgatgacaaacctcgcctcggggatttccgtcgtcagcttatcggtcaggtgaaagaaactctgcaaaaaggcaaaacgcccagcgaaaaataatgcaatatcgggtgctgaccggatatctttacgccgaagtgcccgtttttccgtctttgtgtcaatgattgttgacagaaaccttcctgctatccaaatagtgtcatatcatcatattaattgttcttttttcaggtgaaggttcccatgcgtctggaagtcttttgtgaagaccgactcggtctgacccgcgaattactcgatctactcgtgctaagaggcattgatttacgcggtattgagattgaccccattgggcgaatctacctcaattttgctgaactggagtttgagagtttcagcactctgatggccgaaatacgccgtattgcaggtgttaccgatgtgcgtactgtcccgtggatgccttccgaacgtgagcatctggcgttgagcgcgttactggaggcgttgcctgaacctgtgctctctgtcgatatgaaaagcaaagtggatatggcgaacccggcgagctgtcagctttttgggcaaaaattggatcgcctgcgcaaccataccgccgcgcaattgattaacggctttaattttttacgctggctggaaagcgaaccgcaagattcgcataacgagcatgtcgttattaatgggcagaatttcctgatggagattacgcctgtttatcttcaggatgaaaatgatcaacacgtcctgaccggtgcggtggtgatgctgcgatcaacgattcgtatgggccgtcagttgcaaaatgtcgccgcccaggatgtcagcgccttcagtcaaattgtcgctgtcagcccgaaaatgaagcatgttgtcgaacaggcgcagaaactggcgatgctaagcgcgccgctgctgattacgggtgataccggcaccggaaaagatctctttgcgtatgcctgtcatcaggcaagccccagagcgagcaaaccttacctggcgctgaactgtgcgtctataccggaagatgcggtcgagagtgaactgtttggtcatgctccggaagggaagaaagggttctttgagcaggcgaacggtggttcggtgctgttggatgaaataggtgagatgtcaccacggatgcaggcgaaattactgcgtttccttaatgatggcaccttccgtcgggttggcgaagaccatgaggtgcatgtcgatgtgcgggtgatttgtgctacgcagaagaatctggtcgaactggtgcaaaaaggcgtgttccgtgaagatctctattatcgtctgaacgtgttgacgctcaatctgccgccgctacgtgactgtccgcaggacatcatgccgttaaccgagttgttcgtcgcccgctttgccgacgagcagggcgtgccgcgtccgaaactggccgctgatctgaatactgtacttacgcgttatgcgtggccgggaaatgtgcggcagttaaagaacgctatctatcgcgcactgacacaactggacggttatgagctgcgtccacaggatattttgttgccggattatgacgccgcaacggtagccgtgggcgaagatgcgatggaaggttcgctggacgaaatcaccagccgttttgaacgctcggtattaacccagctttatcgcaattatcccagcacgcgcaaactggcaaaacgtctcggcgtttcacataccgcgattgccaataagttgcgggaatatggtctgagtcagaagaagaacgaagagtaagcgtgaatatgcctgatggtgcaacaccatcaggcatattaacttatgctttcagtacagccagagctgcttcgtaatccggctcggtggtgatttcatccaccagctggctgaaaatcacattgtcattttcatcaataaccacaacggcacgcgctgccagacctttcagtgggccatcagcaattgccacaccgtaggcttgcaggaattcagcgttacggaaagtggagagggtgataacgttgttcagaccttctgcgccgcagaaacgagactgggcgaacggcagatcggcagagatacacagcacaacggtgttgtcgatctcggttgccagttggttaaacttacgtactgatgcggcgcaaacaccggtatcaatactcgggaaaatgttcagcactttgcgtttacccgcaaactgaccgagggtgacgtcagacagatcttttgccacgagagtaaaagtctgcgctttgctacccgcctgcgggatggaattggcgactgtaaccgggttgccctggaaatgaacggtttgtgacatgattatctttcctgtttacatatagttaacgtcacacctagtttatgctaactgtcaataacacagcaaacgctatttgcgcttaatccgcagaccaccgcgacaacaaggagtaaagatgagaaccgttaaggtatttgaggaggcctggcccttacataccccgtttgtgattgctcggggaagtcgcagtgaagtgcgcgtggtggtggttgaactggaagaagaaggtattaaaggcaccggcgaatgcacgccgtatccgcgttatggggaaagtgatgcctcggtaatggcgcaaattatgagcgtcgtgccgcaattagagaaagggctgacacgggaggagttgcaaaaaatcctccctgccggcgcagcacgtaatgcgctggattgtgcattgtgggatctggcggcgcgaaaacagcagcaatcgctggctgatttgatcggcataacgcttcccgagacagtcaccacggcacagacgatagtcatcggtacgcctgatcagatggccaatagtgcatcaacactctggcaggcaggcgcgaaattactgaaagtgaagctggataaccatcttatcagtgagcggatggtggcaattcgcacagctgtgcccgatgcgacgctgatcgttgatgcaaatgaatcctggcgtgcagaagggttggcggcgcgttgccagctattggcagatttaggcgttgcgatgcttgaacaaccgcttcctgcgcaggacgatgcggcgctggagaattttattcatccgttaccgatttgtgctgatgaaagttgtcatactcgtagcaatctgaaggcgctgaaagggcgctatgagatggttaacattaagcttgataaaaccggtggtctgacggaagcgctggcgctggcgactgaagcgcgtgcacaaggttttcgtctgatgctgggctgcatgttgtgtacctctcgggccattagcgccgctttaccgctggtgccgcaggtcagtttcgccgatcttgacggaccgacctggctggcggtagatgtggaaccggcgcttcagttcacgacgggcgaattgcatctttaggatgccagcgcagcaagtttgccatcgcaaagagatatttttcgctggcttcgtcggaggagatgggtggaaactctgcggtgatgcaatgcaagttgagatctgcacaccaactgccgaaagagccaggcgtttcataaccgacgctggttaccagaggcaattcaaacgcctgggccagccattcacctaattcgctgtgtctgggatcttcaatacaggccagcggatcgtggaatgagaccacctaggcaggttgaatgcggtgtataagttggcacagcgcctgggtttcaggttcggagccaggtttgtcacctgtcagtaaaacgacatcacgttcttcagcggcgctgttccagcgataaactgtttcaccttccttccagttcgctgccggaaagtttcggtttaaatccacaccattagcattggcccgtaaccctaactggcagccgtcaggattcacacacagcaccacatgatggcggcgcaaagacggtgtcaaagtccgcagagcacaggagagcgtgacgatcgaagagttttcatcaccgtgagtgccagccagaatcaaaccactttcgtgactggcggctggggccggaaaccagattaacggcgcgcccaataatgaacgtccgtaatgttctgttccgggcggaaatgcgccgcgttcggcgcgtgggcgagttacggtcatgatcgtctctggttcaggaagtattacaggcagtgttgtgcaaattttgcggattatcaaatccttttcttcaacgctatgccatcgatcttgtatcacttttttgccggaagttgtttgtattttcattgatgtgcagatattagaattgtcgtaatgttatatacatggcgtattttattcttactggttctacacatgttaatcgcatctgattgatcagttcaccttaataagtttaataaatcgtactgcacatagtacagtacgatggtagctatataattgatttacatgaagaagggcttatcaccatcagtcccgggttgattgatgcctatattctcaccaatgtgtttctcaggtttattgatgatatctgtgattaatgctgcgacactcttacgtgatacgatcgtacctttgaatggttcattgcgtgaggtaagctcataatcaataatatcttcatcagtcagccaggcagggcgaagaattgtatattccagtccagaagcctcaattgcatccgcagccctgcggaatggttttaggggttcaccaataactgcattattccattcgccaaattttcctggaacttcattataaataccgagggaaagaacaaagatcagacgtttaacatcacaggctttcatcgcagcgatcactgaatttgcctgaatatctaaatcttcccccgtaaggttggcatacacaacatcctgtccctgcatggcctgcttcagtgctgcatgattcagtacatcccccataataatcttgctattagttggatagggtttgtggatttttgctggctgacgggcaaataaagtttgtttaatggtttgtttatctgccagttgattaatcacatggcgggctatctgaccgccagcaccaagaatcagtacatttttcatgaaacttttcccagattattggcagcaatatgccaggccatatcactattacggatttgaatatgtttcattacagagtttcctcaaagaacggagctaatactgaaattgcttcagccacatagactttgccatcataaagatccatatggtttgcgccttcaacaatgtgatagcgtttatcctggcttgatgctcgatcgtacaggtcgtcactcatccatttgctcccagcctggctgcccgccacaatctgtatcggctgagtcaggtacacttccgccatatggtaagcatcataggtaataatctggttaaggctgcgcaaagtagcgtaacccggtgctgttggatactgcgcgcgaggggtgtggtaatactcccaggcctgacgcagttcttcgttcggcgcatcggactccttcattggtgccagtggcatagtggcgtattctccgctgctaatatcgctggttcgggcgtttgaacccgcgtcaacgtatggtagggcatcaatagatttcacattgttttcccaaccattacggaacatcgaaccaatattgaccgcactaacagtaccgatggccttgatgcggcgatcctgaattgcagcattggctgtatatcctgctccggcacaaattcccatcgcaccaattcgggtattgtcgacataagaaagcgttgtcaggtaatcaatcacggcactgacgtcttcagtacgaatgtatgggttttctaactgacgcggctcgccgccgctttcaccttgataagatgcgtcataagcaatagtgacaaatcccttttccgccagtttttcggcataggttccggccgtttgctctttaacgcccccacctgggtgagataccacaattgccggatactgacgggtttcatcaaattttggagggaaatagatcactgcagacaaagagatggttggattattgctgttagtgacgctgactttattattcatcattccgttcctcatggagttgtcggttcgttttaacggttggtgatatcactatagatattgatcattaagttgattagacccaaaatcatgattagacctatcatttaaatgattaatagattgtatggagatactgaatgaagcgtgaagaaatcgctgatctgatggcgtttgtcgtcgttgcagaggagcgtagcttcactcgcgcagcagcccgcctgagcatggcgcagtcagctttaagccagatagtgcgccgtatagaagaacgattgggattgcggcttctgacgcgaaccacgcgcagcgttgtacccactgaagcgggcgagcatcttttgtctgttcttggccctatgttgcatgacatagattctgccctgacatccctgagcgatctgcagaaccgcccatccgggacaatacgtattactactgtagaacatgcagcaaaaacgatattgttaccagctatgcgcacattcctgaaatcgcatcctgaaattgatattcagcttaccattgattatggtttgaccgatgtcgtttctgaacgttttgatgcaggcgtccgtctgggtggggagatggataaagatatgatcgccattcgaatcgggccagacataccaatggctattgttggctcaccggattatttttctcgtcgaagtgctccaacgtcagtgtcacaattaatagatcatcaggcaattaatttgtatcttcccacatcgggtacagcaaatcgctggagattaatacgcggtggacgtgaagttcgtgttcgcatggaaggtcagcttttactgaatacgatagacctgatcattgatgctgcaattgatgggcatggattggcgtatctaccttatgatcaggttgagcgggctattaaagaaaaaaaactgatacgtgttttggataaattcacaccagatttacccggttatcacctgtactatccacaccgtcgacatgctggctcggcattctcattatttatagataggctgaagtataaaggtgctgtttagcactacttgctgatacattaatttaattcttctcttaacgtattctcagttcctttcaacgttttggttattttttattcttcgcacaatggcgacagatgctgattatgataccgaaaacgggtttgaacgtgcgaagcccgaacgtagtgttcggagttctatgtgctttaccgcattttggagactattatttacactaaatctgatttgatatattgatacttaaaacatttgatgcttcctttgtcacttttttgatggaagttgtttgcatttctttaaggcgaaacaaataattacgcatcaattttaatgtcggttagagggaaacttatgaagcactctgtttcagtcacgtgttgtgcgctgttggtcagcagcatttctctttcgtatgctgctgaagttccgagcggcacagtactggcagagaagcaggagctggtgcgccacattaaagatgagccagcgtcgctggatcccgctaaagccgtgggcctgccggagattcaggtcattcgcgatctgtttgaaggactggtgaatcagaacgagaaaggggagattgtccccggcgttgcgactcagtggaaaagtaatgacaaccgtatctggacttttaccctgcgcgataacgcaaaatgggcggatggcacaccggtaacggcgcaagattttgtctacagctggcaacgtctggtggacccgaaaacgctatcgccatttgcatggtttgccgcgctggcgggaatcaacaacgcacaggcgattattgatggtaaagccgcgcctgaccagcttggcgtcaccgcagttgatgcccatactttgaaaatccagcttgataaaccattgccgtggtttgtgaatttaaccgctaactttgccttcttcccggtgcaaaaagccaacgtagaaagcagtaaagagtggacgaaacccggaaatctgatcggcaatggcgcttatgttcttaaagagcgcgtagtcaatgaaaaactggtcgtggtgccgaatacccattattgggataacgccaaaacggtactgcaaaaagtgaccttcctgccaattaatcaggaatccgcagccactaagcgttttctcgcgggggatattgatatcaccgaatccttcccgaaaaatatgtatcagaagctgttgaaggatattccggggcaggtttatacgccgccgcagctcgggacctattattatgcgtttaacacgcaaaaagggccgacggcagatcagcgcgttcgcctggcattaagtatgacgatagatcgccgcctgatgaccgaaaaagtgttggggacgggcgaaaagccagcgtggcattttacaccagatgttaccgcgggatttacgccggaaccttcgccgtttgaacaaatgagtcaggaagaactgaatgcgcaggcaaaaactttgttgagcgccgctggttatggtccgcaaaaaccgctgaagctgacgcttttgtataacacttcagaaaaccatcaaaaaattgcgattgctgtagcatcgatgtggaaaaagaacctgggcgtagatgttaaattgcaaaaccaggaatggaaaacctatatcgatagccgtaataccggcaattttgatgttatccgcgcctcgtgggtaggggattataatgaaccctccactttcctgacattattaacgtcaacgcattccgggaatatttcacgctttaacaatccggcatatgacaaagttctggcccaggcatcgacggaaaataccgttaaagcgcgtaatgccgattacaacgcggcagaaaaaatcctcatggagcaagcaccgattgcaccaatttatcaatataccaatggacgattaatcaagccgtggctgaaaggttatcccattaataaccctgaagatgtggcgtacagtcggactatgtatattgtgaagcattaatgtgatgggaactggcgttacccttgtggataacgccagtgatgtctgatttagcgaccctggtccggcggtgtaatgttatccatatacagcgtctggctggggaaggcaaagtccgcgccgtgtgactgtacaatatcgataatcttcaaataaacgtcttgctgtgcagcaagccactcagcccataccgtggttttggtaaagcaataaaccataatatttaatgacgaatcagcaaactggttgaaataaaccagtaaggtttgtcgctggtcgatggccgggtgatttttcagcatctcacgtacggcttcgacaataacgcccacttttgccgcatcctcataacgtaaaccaatggtcgtggtaatgcgccggttggtcattcgtccaggattttctacgctgatcgacgaaaacagcgagttcggtacgtacaatggacgattatcaaaggtcttaattttggtaattcgccagccaatttccgctactgtaccttcgatatttctgtccggtgaacggatccagtcgccaatactgaaaggacggtcgaaatagagcataatcccggaaaagaagttactcagaatatctttaccggccataccgacagccagaccaccaataccaccaaaggtcaacaagccagaaaggctcatgccgaaatgttcgccataaagcagaacaagcaccacaataatggtgattttgataatgcgcgacatgatccgcgcactggtgatatcgcgaccttttttaatctgctgtttttcaaactgattaatcagcagaaatagcttaatcgtcagaataaccgcaatcagggacgtacagataaaatcgataacgcctggggtgataaatttgagtttatagttttctataacatagttaatgatgctaccaacagcactaataattatggtgtagattaaaaattgcaccgcatggaataaaaatccttttcttttacgatttccacggcgaaaccaaaagctcatcagaatcaatgctgcgcagctaccgaaaataatgaccagattaagcgcattatttgtaaacagttcagcgatcattgttttatcaggctcctccagataattgtcgtcatgccggaaacccctggcgggactattttaccgcgacaattcattcagatcatcaatagtcagggaaggaagtagcaacattagctaactaatcaatgcgttgattgtaaatccagctaagaggtgagattttcagagcagacaacggtaaaatgtcatggtattgttacgtttaggtaacaagaaatttgtctgcacaaggattacatcatgattatggcgaaactgaagtcagcgaaagggaagaaatttctctttggtttgttggcggttttcattattgcggcgtcggttgtgactcgcgcgaccatcggcggcgttatagaacagtacaatattccgctgtctgagtggacgacatcaatgtatgtgattcagtcatcgatgatttttgtttatagcctggtctttactgtgttgctggcaatcccgttgggaatttatttccttggcggcgaagagcagtaagtaaaaaataggcccgataactcgggccttgtcagttattgaagagtcgttaatcgtcttcttcgtcatccagttcaacgggtgtctgatactggtcaggtttaatgaccagcaggtcgcagcgaagatgatcaatcacctgttccgccgtgttgccaaggaatgctgctgaaataccggtgcgtccgaccgtgcccagaaccacaatccccgcctgtaagtgctccgccaaatcaggaatcacctcttcgggcagacctttttctacgtgcgtcatgttttcattaatgccgaatttctgtcgcagagctttcattgccagcaaatgttgcccacgaatggcatcgttataaacgctcgggtcaaattccggcagttcaatcgcgatattaattggcgttaccggataagcgccaaccagatgaacttcggtatggttgacttgttctgccagttcgatcgtctctttgaccagtttttcattgagcgcattatggtacggctcttcactggcgagattcaccgccaccagcgccttacccccttccggccacggctggtctttcaccatccacacggggcttgggcatttgcgtaacagatgccagtccgttggcgtaaaaatcaccgcttccagacggtcatgttggtgcgccatttttagcaccaaatcgtgcccgccgctgatcacttcctgaatgatggcttcgaaaggacggttatgccagaccactttaatttcaatgggaacgccagcattgagataatattttgcctgctcgtggatccaggctgtacgctggctgatgacgccctgacgcatagcggtacgttcgtccggagagagcagggtggtcatttcgtatgagaagtcatagatcggcaaaaaggctttaattttgccaccaatccgttgatgtaaataaacagctcgccgcaatgctggttggtcgtcctggttaggatcgataacaacgagcatgttctgatacatagccatacagggtctccttacaacaactgtcaacgcagtttgtaattaaaagattaacccatatctggtgaatgaaacagtgatgaaccttctgtcagatcaataaatcagaaaaatttaatgatatgacagaaggatagtgagttatgcggaagaatcaggcaacgttacgcgtatgaccagcaagctgggccagcgcatcgttattttcgatagtgatgtatttacctttgactgccagcataccgcttttctggaagcgacccagcagacggctgatggtttcaaccgtcaggcccagatagttaccgatatcaccacgagtcatcgtcaggcggaattcacgaggggagaagccgcgttgggcaaaacgacgggacaggttgtagatgaatgcagccagacgttcctcggcatttttcttcgacaacagcaggatcatgtcctgatcgcctttgatttcaccgctcatcagacgcatcatctgctgacgcagattcggcattttaccagacaaatcgtccagcgtttcgaacgggatttcacataccatcgaggtttccagcgcctgcgcgaaactcgggtgatgaccgctgccgatggcatcaaatcccaccagatcgcctgctaaatggaaaccagtgatttgctcgtcgccttgctcagtgatggtataacttttaatcgtaccggagcggatggcataaagcgatttaagttcatctccagccttaaacagcgtctggcctttctgaataggcttcttccgctcaatgatattatcaagctgatcaagctcatgttcgttgagtgtgaacgggatgcaaagctggctgatgctgcaatcctggcaatggatagcacaaccgccagactgaatgcgccgtataattcgcttttccgggatcataggtctgctcaagccgtaattgatatttgtcaattttaacatctttttagggagcaagtaagtctaagcaaaccttaacagcagagaattccgatattagatgtaaatatatgtctatctatttgaaaacccttaagttgttaagggtgactttacataaaagtgtgaacaagctggcacaaattgtttaatgtttacagcaaaagataaccttcgtggcgcaataaccactcttttcgcagaactccgcctgcatatccggtcatggtgccgtttcggccaataacccgatggcaaggtacgacgatgctgatgggattcgatccgtttgccgcaccaacggcacgcgccgcgccagggcggcctaattgttcagccagttggccataatgcattacctgcccgcaggggatagtgcgcagtgttttccagacttcgcgctgaaatggcgtcccccccgtggcagtgggaagcgtatcaataatgctaagattaccggcaaaatattcacgaagcttgtcgcttaaaccacctgggttggtggcagaaatgcgctcatagctttctttgcgataatggatgtccagcagctgcaccatgcgttcgctgtactcttcccattcaaccgcccgcaggcgaaattgctcatcgcaaatcacccacagtggacccagtggcgtggcaattttttcttcaagtaatctcagcatccgttctctcttaagacaaacgtgggtaaatacccggacctgtcggcaagccaacaagataccacgccagcaacatcagcagccataccaccaaaaagattaatactaacaaaaagtaagtaccaggtttcgcgtctggtttgtcgcagtatttaagcataaagcgattttttgatttttctgcctgaagaaatgagggcaagccatcaaattccagtcagcgaaattttaccgtaggctatccgttatttgattctgtggcgtgatagccgccagacaccactgatctcgtcactcattccccaatcccggcgagaatgtggttatttacagagctaaaaaatgaataaaaaaatagagcctgtcgacatccgccagactctacagtacacacagcagtgcatcctcgtcttaaatccggcctggggtcctggtgaccggtgacagtgttataacggttttacccatccgttgccaattttcttcagtgacagatttcacgaaaatataagttaaatcatttgccttgtgattgcataatcatgcatcgttaatcgacgagtaaatttaccgggcgagtagcccgttcgacgcttaaacatattgccgaacgattcagctgaggcatagcccagacgatgggcaattttggtcaacgaatatccatcatcaagaagcgtcactgcagaaataacgtgcatttgctgaacccagtggcgaaatgttaatcccgtctctttaacaaataagcgcatgagtgtacggctactgacgttaattttatccgctagattatccagtgttggcagatacccttggttgtttagcaaattctcacaaagctgctgtagccgctcatcatttggccaagggagttcaagtgacattttcacccccatttttatttcctgaagtatcagcgtctcgagggctgaaaaacgtaactgttgtttatctgtggtactttgcgacggtggaagttggttaattgcaattagtaattcccttaacaggggtgaaatacccgtcatgaagcaaacttttcccagcgtttcactttccgcttctgaaaccagtacggtttttaaaagtacgttgcctgtcgcaacaaacttatgcggcatttgtgggggcagccaaagcgcgctgctggcatgcactagccagacgctttctccagcccatatacgaacgactccttcagccgggtaaagcaactgggcatagagatgtttatgccagggaactgtgcctccattcagatgttccgaatccagtccgataatgtgatgccctggtgatgctttaggttgcagtgtgattgtcatttacagtaggtattttgtcagaaatcatcaaataagccatgttaaattttaaatatgacgtatgcaagtttccggatatatacggtgtaaagagtgatgataatttctaaaaaacagcttattggggtggtagcgatcggtattcttttggctggcgttgtcttttttatctggtgggtaagcaaaggaagatttatacagacgacggatgatgcttacattggtggtaatatcaccacggtggcaagtaaagtttctggttatatttctgctatagaggtgcgcgataatcagagtgtaaaaaaaggcgatattatcctgcgtctcgatgatcgggattatcgtgcaaatgtcgccagattagagggatttcgcagcagtttgcgatggcccccatcgtaacattaacgctggggggaattccaaaagaacggctgaagttagcctctggtgtatttaatttaacacgtaatcttgggggcgcaattggtattgccctgtgtggctctattctcaataatcgaactaattttcatttttcgagaatgggtgaaaaaatggtttctgttccccatatggtgaatgacttcatttccagaagtgctttgttttttaatcgcagtggaagtgaccagacatcggaaatactggcttcaaccaaattattgagtcaattgatgctgagggaggcgcaaactatggcattttcggatacctttctgctaatcagtggtctgttatttatcgcatttttgttggttcctgctatgaataaatcatcctgatcggagcctgtgctgaattaaactcgggctaaactgttcgatactgctaacaggctagtataaaatgccccgcctgcgcagatactcacaggtatgaagtagagtattgtttcaatctgtgaagggaacgatgcagtaagtatgaacaattaacccgtctgaatcacgacgtgtgaaggtgcataggaggttacatgaaccttgacgacaaatcgctgtttcttgacgccatggaagatgtccagccgctgaaacgtgctacagatgtccactggcatccaacgcgtaaccaacgtgcgccgcagcgtatcgacacgctgcaacttgataatttcctcaccaccggatttctcgacatcatcccgctaagtcagccgctggagtttcggcgggaagggttgcaacacggggtgctggataagctgcgcagtggtaaatatccgcaacaggcgagcctgaatcttttgcgccagccggtggaagagtgccgcaaaatgatgttcagtttcattcaacaagccatggcggatggtttgcgtaacgtgctgattattcatggtaaagggcgggaagataaatcgcatgccaatattgtccgcagctatgtggcgcgctggctgaccgaatttgatgatgttcaggcatattgcaccgcgctaccgcatcatggcggcagcggggcttgttacgtcgcactacgtaaaacggcgcaggcgaagcaagaaaactgggagcgccacgctaagcgcagtcgttgatctcgagacgcatccgcggcttatgccgccagcacgcggttgcgtccatcatttttcgcccgatacaaagcatcatcaacgcgtttaaacagttcatcgatgctttcatttccttcgtgatgcgccacaccaatgctgacggtaaagcgtggtaagctcgaaatactcacttttgccacgcttacgcggatagtttcagccagcgaaagcgcggtatccagtggggttcttggtagcaataagacaaactcttcgcctccccaacgaaacaccaaatcgcctttgcgagcgcaactttcgagagtgcgggcaagggcgcataacacctcatcacctttagaatgcccatagagatcgttaatgtgtttaaaacgatcggtgtcgatgagcaacaagctgtaatcctgagcgatggcgaggtgctgcatttggcctggctcggtaatgtgataaaactgtcgccgattcagtaatcctgtcatcgcatcatggtgggcagcatgttccagctgctcctccagccgtttttgctcagtaatatcatgcacaatacataacatgagcttgtcaccataaatttcaatcggcccggcataggtctgcacatgacgagtcgaaccatccgccagtttatgaacaaaattcaaaggtttatgaccaccgggtaaatgcgagatttcatgcatgataggcatgacgcgacgcccgagcatattaatttcccaggtatgtttctggcacatcgtttcatggttataaccatagaaattgagcgcggcgaggttagcatcgacgatttggccatctcgtgaggggtcaatcaacaacattggtgcagagttagtcagaaaaaagcgcgcataaaaaccttgttttttgcgctgataatttgccgagcgactggcttttaaacccagcgttgccggcgcttcgataccttcgaaaataatcaccggttctgcttctgtcagctttcgcaaaacaagtcgacagctcaatgctgtttcctcttctttacgctgaacggtgagtatttcgataatatcgtgttgattttgcagatcggagaggtatttcggcagttctttttgtgaggagacggaatagggaccggttcgtagctgactaaacgtgaggtcttgcatcaacagtcgcgccgcgctgttggcataaattaactgttcctcaaagggcgaaacgatccagacaggactggtgagtaagtccagggtattgaagttgtgtgtaatcattgagatcccattatttttatcaatttttgttgctatccgatcgcaaaaaagccacgtcatatgatcagataattctgataatgatagacgctatttaacacttcacacggtttgtatacggaaaagcattttgctttttgtattcaatttagacagaattttattaatcatttcagggtaatggggtgatgagatgttgcgtaacagggccagaaggctagactacaaaataatgcgttgatgatggaggcactgtggaagcgattaagggatcggacgttaatgtcccggatgcagtatttgcatggatgctggatggtagaggcggcgttaaaccgctggaaaatacagatgtgattgatgaagcgcatccctgctggctccaccttaattatgtacaccatgatagcgcccaatggctggcgacaacaccgctgcttcccaataacgtacgtgatgcgctggcgggcgagagcacacggccccgagtcagccgtctcggtgaaggcacgctgattacattgcgctgtataaacggcagcaccgatgaacgccccgatcaactggtcgccatgcgtgtatatatggacgggcggttaattgtttcgacccgacaacgcaaagtgctggcgctggacgatgtggtaagcgatctggaagaaggcactggtccgaccgattgcgggggatggctggtggatgtgtgcgatgcgttgaccgatcattccagcgaatttatcgagcagctgcacgataaaattatcgaccttgaagataatctccttgatcagcaaattccaccgcgtggattcctggctctgctgcgcaaacaattaattgtgatgcgtcgctatatggcaccgcaacgtgatgtttatgctcgtcttgccagtgaacgtttgccgtggatgagcgatgaccaacgccgtcggatgcaggatattgccgatcgccttgggcgcggtcttgacgaaatcgacgcctgtatagcacggactggcgtgatggcggatgaaatcgctcaggtgatgcaggaaaatttagctcgtcgtacctatacaatgtcgttgatggcaatggtctttttacccagtacgtttctgacagggttatttggcgtcaaccttggtgggatccctggcggcggatggcaatttggattttcaattttttgtattctgttagttgttcttattggtggtgttgctttatggttgcatcgtagtaaatggttgtaacaaaagcaatttttccggctgtctgtatacaaaaacgccgtaaagtttgagcgaagtcaataaactctctacccattcagggcaatatctctcttgcaggtgaatgcaacgtcaagcgatgggcgttgcgctccatattgtcttacttccttttttgaattactgcatagcacaattgattcgtacgacgccgactttgatgagtcggcttttttttgcctgttatttatcagcgtctaccctttaagagtccacccaatgaccggagggaaatatgacgacacttatttatttgcaaattcctgtccctgaaccgattcctggcgatcctgttccagtacctgatccgatccctcgcccgcaacccatgcctgacccaccacccgatgaagaaccgattaaattgtcgcatcgtgagcgtagatctgcgaggatacgcgcctgctgactttgcgtcgatgaccacgagaatagattgtgaccgctttttctaccctgaatgttttgcctcccgcccaactcacaaaccttaatgagttgggttatttaaccatgacgccggtgcaggccgccgcgcttccggcgatccttgccggaaaagatgttcgcgtgcaggcgaaaaccggcagcggcaaaacggcggcttttggcctcggcttgttacagcaaattgatgcgtcgctatttcaaacccaggctttagtgctgtgtcctacgcgtgaactggcggatcaggtggcaggtgaattgcgtcggctggcgcgttttctgtcaaataccaaaattttgacgttgtgcggtggtcaaccgttcggtatgcagcgtgattcgttacaacatgcgccgcatattatcgtggcaacgccgggccgtttgctggatcacctgcaaaaaggcactgtatcactggatgcgttgaatacgctggtgatggatgaggccgaccgcatgctggatatgggatttagtgacgccattgatgatgtcatccgttttgcgccagcatctcggcagacacttctgttttcggcaacctggccggaagccattgccgcaatcagcggaagagtgcaacgcgatcctttagcgattgaaattgactcaacagatgctctgccacctattgaacaacaattttatgagacatccagcaaaggcaaaattcctctgttgcaacggttattaagcttgcatcagccatcctcttgcgtggtgttttgcaataccaaaaaagattgccagtctgtctgcgacgcgctgaatgaagtagggcaaagtgcattgtcgttacacggcgatctggagcaacgcgatcgcgatcagaccctggtacgttttgctaacggtagcgcccgtgtactggtcgcgactgatgttgctgcgcgtggtctggatataaaatcgcttgagctggtggtgaactttgagctggcgtgggaccctgaagttcatgtacatcgcatcggtcgtacagctcgtgcaggaaatagcggtctggcgatcagtttctgtgccccggaagaagcacagcgggccaatatcatttctgacatgttgcagataaaacttaactggcaaacgctgccagcgaatagttccattgtgccgctggaagcagaaatggcaacgttgtgtatcgatggcgggaaaaaagccaaaatgcgcccgggtgatgtattaggtgcgctgacaggagacatcgggcttgatggcgcagatattggcaaaatcgccgtgcatccggcgcatgtttatgtcgcggtgcgtcaggctgttgctcataaagcatggaaacagttacagggcgggaagattaaaggaaaaacgtgccgggtgcggttattaaaataatgaaatgttgaattgcagggtgcaagagtaaacatcttcttaggcattgccggatgcgacgctggccgcgtcttatccggcctccataagagtagcccgatacgcttgcgtatcgggcgctatcctggttatttcacttcaaccacattcagccgtaactcatccaactgattttcatcttcttctggctgccagcccgctggttgtagtgggatctcttcgcgatcaaacgccagatcacccccgttaaccacttcagaaccgtgggtaatgcctttgaaatcgaacaggttggtatcgcacagatgcgacggcaccacattctgcattgcgctgaacatcgtctcgatacgccccggataacgtttatcccagtcacgcaacatgtcagcaattacctgacgttgcaggttaggctgagaaccgcacaggttgcacggaataatcgggaacgcttttgcatcggcaaagcgctgaatatctttctcgcggcagtaggccagcggacgaatcacgatatgtttgccatcatcgctcatcagtttcggaggcatacctttcatcttgccaccgtagaacatatttaagaacagcgtttgcaggatatcgtcacgatggtgacccagcgcgatcttcgtcgcccccagttccgttgcggtgcgataaaggataccgcgacgaagacgagaacacagtgagcaagtggttttgccctccggaatcttctctttcacgataccgtaagtgttctcttcaacaatcttgtactcaacgcccagcgtttcaagatactcgggcagaacgtgttccgggaagcccggttgcttttgatcgaggttaacagccaccagcgaaaaattgattggcgcgctttgctgcaaattgcgcagaatctccagcatggtatagctgtctttacccccggagaggcaaaccatgatgcgatcgccttcttcaatcatattgaagtcagcaatggcttcgcccacgttacgacgcagacgtttttgtaatttgttcaggttgtattgttctttctttgtaatttgttgattttcttgcattatttcagttctctggtactaagtggggcatattgagggcaaactttgcaactacgataaccgcgcattcaacatggctacctgttcgtcgttcatgtcatcaatccacataccgtaaatttcatacaccatctgcgcagtttcatgccccatctggctggctataaatgccgggttcgctcctgccgtcaacagccagcaggcaaaagtatgtcgcgtatggtacggattacggcggcgaataccagcacgttttactgctgcattccatctcgctcccaaatagtcgtagtgaaatctgatgggaaagccttgcttagcatgctggtgttgcgctacccgtacaggatgcggtaacacaggaagaaattagaacagaaactgtggcggacattgtgcattcgttgccaggcggagaaatagaacgctacaacaagtgcagaatataatttttcgcaagtgccagaatagcgatattatgcagtgttttttagttttctatcaggggatattttgtgaaacttttcggtgaataaaataattctctgtaataaatgatgggtatggttggtggttatatttgcgcatggaaatattacattggatatgaatgtatttcaaatgaaagaaccatgacacccgaatggagttagggattcattacgtatctaatctaaagaataagaaaaatacttaattcattgtgggtggtgatgatatcttgatatgtaaaaatggttctcttaataagatgtaactagcttattacttatccatagcacaagaaatggtcctgtatctgcgttgccatgaaataagataggcctaaatgtaataaagagttgcatgacaaaattactaaagttcacaataaaaaagaattaagttttttgttcaagtatttttttagtgtattgttttgaaatgttctacgctgctctaaccttcagtctgaagagggcttgaatcgtgatgtcagttcgattgacataatgttattaataatgtttacgtttgaatgtgaaatatgcttaactatgccttgattgttaatcacagggactgactatgagaaaaatactgatgtatttatgtattagcatatggattgttatatcatgcgtgcctatcatattaactagcgagtatttaacagaggcgagtataatggcattgatgtttggtcatgccaatgcactatgtattggggtttttatttctattatttatatagaatgctggaggtaaatagtgtgaacagcattagtttgatgattttatactgaactaaagggggaaagaggtaacgaaaaaagacctccaccaggtacgaatctgaggcgggcagatggaggtcgatatctacacgattaaattgataagtaaaagtcccatcagggattgatttgttcgagtctaatttaaagtaatttcaacgatttggcagaatttcttagagttaatgattttcaagttttcgattaccaggaaaaaggctgggtgctgataaaatagtcatctgcattccttaaattgtgtaagggtgaaaggataaagttcaatttaaaggcggtgcaatattagcaccatcttatatatgtaatgattgatttgcctctttattctactgttgagattattgtttccgaaaattgattattataagcgcgaaaagaaatgctacagcaaataagaggacgattgtcggcgctggggctctatcgagaaaatataataaccatacacctgatattgttattgatatcgttacggcgataagtaatgccttatgaaagcgatgcgtgatgaggacagcaatagaccctggagctattaatagtatatagacagaataatttcgactgcttttaatgtggcaaaaatggtaggcgataccatgcagagtaaaccgtaatgtaataatgatatctgtaatccgctgacttgtgcctgttgatagtcaagacaaaaattcctgaaaaaacgatacctataatggtatctttctttatgatgctattatctttcagatagccagttgcaattgcacaagacagtcctacaataaatgcaccaattcccagcggcatacctataatccaggctagaactatgccaggaaacattgcgtggttcattgcatctcctattagcgcccagccttttaataccaggaaaactgataataatgcacaggggaacgatattataatagcgattatcaatgcataattcataaatttaaattgtaatgattagaggggaaaatgtcagcacatttgcgaaatgaatcaaaaagcccgcagcaatgtgcgggcgttagtgtcagcgcacaaccagcacggagcactctgcgtgacgcactacagctgcggcgttagaaccgagcagataagtggtgatatccggtcgatgggaagcaatgatgatcatatgagcggggatcttcttcgccaattccagaatgcggtctttgggcgagccttcttcaacatggacatgcactctgtcggttggcagtttaaattttttaatgatctcttccagttgcgatttggcttccgctttcagatcatccattgccggtaattctgcggaataggctaaacccagagaggcatagtagggcagcgaaggtattaccgtcaggaaatgaacctctgcatcatcaatctttgcctctgcctcaacgtggctaatcacgcgttgagttaattctgaatcggaaatatcgatagggacaagaatcgttctgttcataaaacctcctgttttagtatccgcataaagtgtaacgccagatgacactttttgtgtaatgacggagttcacatttttaatttagatcaaaggaggaagaataagcagaaaaagcccgccaaaacagcgggcagggggatttagaactgataaaccagacctaaagcgacgatatcatcggtagagatgccgttggcagcgtagaaactgtcatcttcatccaacaggttgattttatagtcaacataggtggacatgtttttattgaaatagtaagtcgcgccaacatcggcgtatttaaccagatctttatcatcaacacctgccgggttgtctgcaccaccggcagcgtgcaggtcacggcctttagacatcaggaaagagactgccggacgcagaccaaaatcaaactggtactgtgcagtgacttcaaagttctgggttttgtttgcaacagcataatcgctgtcgccaaacggggtcatattacgcgtttctgaatacatggttgccaggtaaatattgttagcatcgtattttagcccagcagtccacgcgtctgctttatcaccacctgccgcagtatggttaacctggtcattggtgcggtcagaagaggtgtatgccgcaccagcgctaaagcccatgcctaaatcatatgttgtggaaagaccccagccgtcaccgttttcatggcgaacatcacgtccgttgttggtgccttcctgaccattactggcaccttcgttgttaccttgatactgcaccgcgaagttcagaccatttaccagaccgaagaaatcagtattacgataagtcgcgacgccattggcacgaccagtcataaagttgtctgcattggtataagagtcaccgccaaattcaggtagcatatcagtccagccttcgatgtcgtacattacgccataattacgtccgtaatcgaaagaaccgtaatctgcaaatttcagtccggcaaatgccagacgggtccatgactggtttgttgaagattcggtgttgtttgcctgaatattgtattcccattgaccgtagccagtgagttgatcgttaatttgggtttcgcctttaaaacccagacgagcatagctctggtcgccatctttcgctgaattatcagaaaaataatgcaggccatcaactttgccatacagatctaatttgttgccgtctttattataaacttcggctgcatgtgcagcacctgcagcgagcagggcaggaattaagagtgccagtactttgcttttcattgaataaatcctttagttattttatttgcctttcatccccattttggggagtgaaaacatcctaaaggagaagttcagttagccgataaatatcatttgttacgccttaagtaaaaccttaattaaataattcttcagaaatgataataagtctggtgaatgtattggagataacacatacaaaataaaaattatacttttaattttctatacgttattctgcgcgggttatatgcctttattgtcacagattttattttctgttgggccattgcattgctactgattttccaacacataagaagacaagcccgaacagtcgtccgggcttttttttagaattggatgatccttatccagagcatttaatcggtgttgcttttttccgcttttccggccatttgtgccaggaagtcatagcgtttttgcaaatcagctgcagcatctttccataactgttctgccacttctggctgctgcgaattcagacgacggaaacgctgctcgtgaagtaacgtttcttccagtgcttctgacggcgggcgtgaatccagcgccagcggtagtttgccttcatcggcacgacgaggatcgaagcgatataacggccagaagccggtagcagtgagttggcgcatctgatcgtggctgagtgccagatcgtaaccatgctcttcacatgggctataagcgatgatcagcgatggccccggatacgcttccgcttcctgaatcgctttcaccgtctggttcagctgcgcgccgagagaaatctgcgccacataaacatgaccgtacatcatcatactgacgccaagatctttacgcgctttacgtttgccatgctcgccaaacttagttactgcacccagcggtgtcgctttcgatgcctgaccaccggtgttggaatagcattgcgtatccagcaccagaatgttgacgttttccgtcaaactcaatacatgatccagaccgccaaagccgatatcgtaagcccagccatcgccaccaatcagccagattgatttttccaccagtgcatctgcgtcacgcagcagttcatgtgcttcggcaacatcgttgagttgctggcgtaaagctgcaacctgttcacgacgaacctctggcgtggcgtctgatttcaacgcagtcagtaattccgccgggattttatcggcaaattgatcgagcagacgcagcacgcggacacggtgttgatcgaccgtcaggcggaaaccaaggccaaattcggcgttatcttcaaacagcgagttcgcccatgccggtccacgaccgttggcatcggtggtatatggtgttgaaggcaggttaccgccgtatattgaagaacagccagtggcattagcgatcaacatccggtcgccatagagctgagtcagcaatttaatatacggcgtctcgccacaaccggagcaagcacctgaatattcaaacagcggtgtaatcagctgcgatgtacgaatatcaatacgttccagtttgctacggtcgatttctggcaggttgaggaagaaatcgtaattgattttctcttcttcgacatgttccaggcgcgacatcatattgatggctttaatctctggattctgacggtctttcgccgggcaaacttcgacgcacaggttacaaccggtgcaatcttccggagccacctgcaagacatatttctgcccgcgcatatcacgcgatttcacatccagcgaatgcaggctggcaggggcgttttccatcgcttcaggcggtaccacttttgcgcgaatagctgagtgtgggcaagcggcgacacagtggttacattgggtacagagttcctctttccagatggggatctcttcggcgatattgcgtttttcccagcgcgtggtgcccatcggccaggtgccgtctggcggcagcgccgaaacggggagggcgtcgccaagcccggcgagtatcgcagcggttacggttttcacgaaatcaggagcggcatcggaaaccaccggcggtcgattggcgctatgcggattaactggctgcagtggaacttcttctacggattcacgtgccagcgccagagcctgccagttgcgttccaccagatcctggcctttgctactgtaacttttggcaatcgcaccctgcaattctgcgagggcactatcgccaggcagaatctgcgtcagatggaaaaaagccatctgcatgacggtattaatacgggccgccaggccacattcgcgggcgattttcgccgcgttaatcacatagaagcgcgcttttttctggtttagcacggcctgaacttcctgcggcaagcgcgaccacacttcagctgcgctgtacggcgtgttgagcaggaaaatgccgccaggttttaaacgctcagccatctgatatttatcgataaactgcaactggtggcagccaacaaaatcagcctgggaaatgagataagcggaacgaatcggctgttcgctcacgcgaaggtgagaaaccgtcaggccgcccgcctttttggagtcgtaaacaaaatagccctgtgcgtaccacggcgtggaatttccgataatcttgatattgtttttggtcgcggaaacgctgccatcactaccaaggccataaaacaaggcttccagtttcgccgagtttggtagggtgttttccggcaacggcagtgacagattggttacatcatcgtaaataccaaccgtaaagcgcgctttcggtttagccgcgttgagctcggcaaataccgccagtacacagtccgggccaaattctttggatgaaagaccatagcgcccaccaatgacacggggcagggtttcgcgctcgccattattaaaggcttctgccagtgcggtcatcacatccaggtacaggggttccgcttgcgcacctggctctttggtgcgatccagcaccgccactatccgaacagagtccggcaatgcttgcagcaagtgtttggcggagaaggggcggtacaggcgaactttcagcacgccgactttttcgccacgggtcagcaattcaccaaccacttcttcacatgtgccaatggctgagcccatcaggataatcacccgttccgcttgcggatgcccgtaatactcaaacggctgatactgacgacctgtcgcggcagcgaaatcattcatcgcctgttcaacatggtcatagactgcgttgtaccatgggttggtggcttcgcgagactggaaataagtgtcaggattggcggacgtaccgcggatcaccggatgttccgggttgagtgcccgggcgcgatgagcatcaatttctgcctgcggcatcagttcaagaatcgtgtcatcggccagcgggacaattttattgatttcgtgagatgtgcggaaaccatcaaagaaatgaataaatggcacgcggcttttcagcgtcgcgatgtgcgaaatgagagcaaagtcttgcgcttcctggacgcttgctgcacacaacatcgcgcaacccgtctggcgcaccgccataacgtcggaatgatcgccaaaaatagagagtgcatgtgtggcaacggtacgtgccgcaacatgcaggacaaacggcgtcagttcgcctgccagtttgtacagcgttgggatcatcagcagcaaaccctgcgatgacgtaaacgatgttgagagggcaccagtttgcaaagcaccatgcacggtagcgatagcacccgcttccgactgcatttcaaccacgcgtggtgtgtctccccaaacgtttttcaagccgtttccggcccatgcatcagcctgttctgccatcgtggaactgggggtaatagggtagatggcgataacttcactggtgcgaaacgccaccgaagcaaccgcgccattaccgtcaatagtaatcatatgacacccttacattgcgcaaatgaggggcgcacgaaattgctgcgcgcccagtagtaatcgttcaattttagcaaatggctttcttctgcattttcgcttttgtgtcccccacatcagcgtaatgaatgttttgatcaaacagagggcaaaaaaatagccataaaaaagtaaaaatgcggggcaacgcgcaggacagctctcgacgccgccctctgtgctgcctattatttatggcggtgtcgtttggcttgaagatcagaggaagaaaagatgcgagcagcgttttgggtagggtgtgccgctttattgttgtcggcgtgtagtagtgaacctgttcagcaggcgactgcggcgcacgtagcgccaggtttaaaagcgtcgatgtccagtagtggagaagcaaattgtgcaatgatcggcggttcgctttctgttgcccgccaactggatggtacggcgattgggatgtgtgcattacccaacggcaaacgctgtagcgaacagtcacttgccgccgggagctgtggcagctattaattcattaaatccgccagcttataagttaatgtctgtttcgcggtcgccagcgttaactggttcgcggtcagatccacttgtgcaccttctttcagcatttcgctaatggtgttatcgagttcattaagctgcgggttagcgcacatcatacgggtcattgccagccctttggcggtcagttcaccattagacagtttgccttcaccgctaaagcggttacacatgctgccggaaatcatcatcttttcaccaaagctgatttctggcggatttttatcgctggtcacgggcttaccgtttacgctttccagcacaaagcgatgatgctgtagctgttctggcgttacagcaattttgtcactacttacacatcccgccatcagcaggcttagcgcaacaagcgcggctactttcttcattgtggttctcaattactgtttctgattcaggactattttaagaatagaggatgaaaggtctttggggattatctgaataagctcccctggaatgcaggggagcggcaagattaaaccagttcgttcgggcaggtttcgcctttttccagattgcttaagttttgcagcgtagtctgagaaatactggtcagagcttctgctgtcaggaatgcctggtgcccggtaaacaacacgttgtggcaggcagacaagcgacggaatacgtcatcctggatcacgtcgttggatttatcttcaaagaacagatcgcgttcgttctcatacacgtccatacccaacgaaccaattttctgatttttcagcgcttcaattgccgcctgagaatcaatcaatgcaccgcgactggtattgacgatcatcacgccatttttcatctgatcgaaggcggcttcgttcaacagatggtagttttccggtgtcagcgggcagtgcagagagataacgtctgattcagagaacagggttggcagatcgacatactccacaccgagttccagcgccgccgcacttggatacggatcgaacgccagcagacgcataccaaaacctttcagaatgcgcagcattgccacaccgattttaccggtaccgataacgcctgccgttttgccatacatagtaaagccggtcagaccttccagagagaagttagcgtcacgggtacgctgatatgcgcggtgaatacggcggttcagcgtcatcatcataccgatggcgtgttcagcaacggcctctggatcataggctggaacacggactactttgagccccagttcttttgccgcgtcaaggtcgacgttattgaaaccggcacagcgcaaggcgatatatttaacgccgtgctttttcagctcttccagcaccgggcggctgccgtcatcgtttacgaaaatacataccgcttcgcagccattggcagttttagcggttttttccgtcagcagaaagtcaaaaaattccagctcaaagccaaaggactcgttcacctgttgcaggtacttcttgtcgtactgttttgtgctataaacggcgagtttcataagactttctccagtgatgttgaatcacatttaagctactaaaaatattttacaaaatttcaaatataattgaaagatatggcgatattgaaaaattcatcaacaactatgcttagtgtaggcgcaaccttcaactgaacggttaaacatgccacaatacccgtattgaatgcttaatttttcgctaaatcaggatattgactacccatgctgggtaaatataaagccgttctcgcgctgttattactgattattcttgtgccgttgacgctgctgatgacgctagggctgtgggttcccacgctggcgggcatctggctaccgctcgggacacgtattgcattagatgaaagcccacgcattacgcgtaaaggtttaatcatccccgatctccgttatctggtgggagattgtcagcttgcgcatatcaccaacgccagcctttcacatcccagccgctggttattgaacgtcggcacggtagaacttgattctgcttgtctggcgaaattgccgcagacggagcaatcgccagccgctccaaaaaccctcgcgcagtggcagtccatgctgcctaacacctggatcaatatcgataaactgattttttctccctggcaggaatggcagggaaaactctctctcgcattaacctccgatatccagcaactgcgttatcagggcgaaaaagttaaatttcaaggccagctgaaagggcaacaacttacagtcagcgaactggatgtcgccgcgtttgaaaatcagccgccggtaaaactggtgggggaatttactatgccgctcgtgccggatggacttccggtaagtggtcatgctactgcgacgttaaacttaccgcaggagccttcactggtggatgccgagctggactggcaggaaaatagcgggcaattgattgtgctggcacgggataacggcgatccgttgctcgatttgccgtggcaaattactcgtcaacaattgaccgtaagcgatggtcgctggagctggccgtatgcaggttttcctttaagtggccgactgggtgtcaaagtcgacaactggcaggcagggctcgagaacgctctggtcagcgggcgactgagtgtgctgacccagggacaagcgggtaaaggcaacgcggtgttaaattttggcccaggaaaattaagcatggataacagccagctgtctctgcagctgaccggtgaagcgaaacaggcggacctcattttatatgcccgtttacctgcgcagctaagcggaagtctgtctgacccaacgctgacctttgagccaggcgcgttattacgttcgaagggaagagtcattgattcgctggacatcgatgaaatccgctggcctttagcgggtgtaaaagtcacccaacgtggtgttgacggacgtttgcaggccattttgcaggcgcatgaaaatgaactgggcgatttcgtgctacatatggatgggctggcgaatgattttctccctgacgctggccgctggcagtggcgctactggggaaaagggagttttacaccgatgaatgccacctgggatgtcgcaggaaaaggtgagtggcatgacagcacgattacgctgaccgatctctccaccggtttcgaccagttacaatacggtacgatgacggtagaaaagccgcgattaattctcgacaagcccgtcgtctggggacgtgacgcacagcatccctcattcagcggcgcgctgtcactggacgccgggcaaacgctgttcactggcggcagtgtgttaccgccatcaaccttaaaatttagtgtcgatgggcgtgatccgacgtatttcctctttaaaggcgatttacatgctggtgagattggcccggttcgggtaaatggtcgctgggacggtattcgtctgcgcggtaacgcctggtggcctaaacaatcactgactgtattccagccgctggtgccacccgactggaagatgaacttacgcgatggtgaactgtatgctcaggttgcattttcagctgcgcctgaacaaggattccgcgcgggagggcacggcgtgttgaagggtggtagtgcctggatgccagataatcaggttaacggtgtcgattttgtcctgcctttccgttttgccgatggagcctggcatctggggactcgcggtcccgttacgttgcgaattgccgaagtgattaatctggtgacagcgaaaaatattacggctgatttgcaaggtcgttatccgtggactgaagaagaaccattgctgttgactgatgttagcgttgatgtgttaggcggtaacgtgctgatgaaacaattacgtatgccgcaacatgacccggcgctgttgcggctgaataatctttcctccagcgaactggttagcgccgtcaatccgaaacaattcgccatgtccggggcatttagtggtgcattgccgttatggctaaacaacgaaaaatggatagtgaaagacggctggctggcaaatagcgggccaatgaccttgcggctggataaagacaccgcagatgcggtggtgaaagacaatatgaccgcgggttcagcaattaactggttgcgctatatggaaattagccgttcatcgacaaaaattaatttagataatctcggtttattaaccatgcaggccaatattacaggtaccagtcgcgttgatggtaaaagcggtacggtaaatcttaattaccatcatgaagagaatatttttacgctgtggcgcagtttacgctttggcgataatctccaggcatggctggagcagaacgcgcgtctaccgggaaatgactgttcgcaaggaaaagagtgtgaggataaacaatgaaaattttactggctgcgttgacgtcatcttttatgctggttggctgtacgcctcgcattgaagtcgctgcacctaaggaaccgatcactatcaatatgaacgttaaaattgagcatgagatcatcatcaaggcagacaaagatgtcgaagagctgcttgagacccgtagcgatcttttttgaggtgatgatgaaaagaacattacttctttgtgcatttcttgttggcttggtaagcagcaatgtaatggcattgactctggatgaagccagaactcaggggcgggtaggggaaacattttatggttatctggttgcgctgaaaacagatgctgaaactgagaaattagtaaccgacatcaatgccgaacgtaaagcgagctatcaacaactggcaaagcaaaataatgtgtcggtggatgatatcgcgaaactcgccgggcaaaagctcgtagaacgggccaaacccggggaatatgtacaagggataaacggtaaatgggtgcgaaaattttaatagcaaaaccgcaatatcgggataacgctacaggagaagacgtttaatctattttccggaaacattttgctcttttaattataaggatgagttatgtttcggctctaatttatttattcgagtattgatttataccgttttttcattaaataaatatctatgtgacgcatttgaatttataatttatataatatacataatttgtatgtttcgcgggtttatttatttctctgtattataaatccagattgtcagagaatatgtttgattaggtaacaatctactggcaatattggacgtcctctatgttttaaataatcaattggtcgggtcagggtatccgaccttctttatattcgccagaaggatttattatgcaaaggaaaactctattgtcggcctgtattgcattagctctgagtggtcagggttgggcggcagatattacagaaatagaaaccaccacaggtgaaaagaaaaataccaatgtgacttgtccagcagatcctggaaaactcagtccagaagagcttaaacgcttaccctctgaatgctcctctgtagtcgaacagaacctgatgccatggcttgtcacaggtgctgctactgcgttaatcacaaccttagccatagtggaactaaacgacgatgatgatcatcatcgcaataattctccacttccaccaactccacctgatgatgattcagacgacactccagttcctccaactcctggcggagatgagataataccagacgatggtccggatgataccccgacgcctcccaaaccgatttcgtttaataatgacgttatcctcgataaaacagaaaaaacgttaactattcgcgattcagtttttacttataccgagaatgctgacgggactatttctctgcaagatagcaatgggcgtaaggcgactattaatctttggcagattgatgaaacgaataacacggttgcccttgaagggatgagcgcagatggtgcaacgaagtggcaatataatcacaacggtgagctcgttattacgggcgacaataccacagtaaacaacactggaaaaaccatcgtcgacggcaaaggcgccaccggaactgaaatcgcgggtaataacgcggtggtgaaccaggacggcgagctggatgtgagcggcggcggtcacggtattgatatcaccggcgacagcgcgacggtggacaacaaaggggcatgactgtcaccgatccggattccatcggtattcagatcgacggcgacaaggcggcatgactgtcaccgatccggattccatcggtattcagatcgacggcgacaaggcggttgtcaataacgacggtgacagtgccatcagtaacggtggcaccggtacgcaggttaacggtgatgaagccaccgtgaacaataacggtaaaaccaccgttgacggcaaggattccacgggcaccgagataaacggtgacaaagccatcgtcaacaacgacggtgacagcacgatccttgatggcggcaccggaacccgcattacgggtgatgatgcgacggccaacaacagcggcaataccaccgttgatggtcagggttcgaccggaactgaaatcgcgggtaacaacgcggtggtgaaccaggacggcgagctggatgtgagcggcggcggtcacggtattgatatcaccggcgacagtgcaacggtggataacaaaggcggtatgaccgtcgcggatgcggattcgattggcattcagatagacggcgacaaggcggtcgtgaacaacgacggtgacaatgccatcagcaacggcggcaccggcacgcaggttaacggcgacgaagccaccgtgaacaataacggcagcaccaccgttgacggcaaggattccacgggcaccgagataaacggtgacaaagccatcgtcaacaacgacggtgacagcacgatccttgatggcggcaccggaacccgcattacgggtgatgatgcgacggccaacaacagcggcaataccaccgttgatggtcagggttcgaccggaactgaaatcgcgggtaacaacgcggtggtgaaccaggacggcgagctggatgtgagcggcggcggtcacggtattgatatcaccggcgacagcgcaacggtggataacaaaggcggtatgacaaaggcggtatgacttgtcaccgatccggactccatcggtattcagatcgacggcgacaaagcggttgtcaataacgacggtgacagtgccatcagtaacggcggcaccggcacgcagattaacggtgatgaagccaccgtaaacaataacggcaataccaccgtagacggtcagggttcgaccggaactgaaatcgcgggtaataacgcggtggtgaatcaggacggcgagctggatgtgagcggcggcggtcacggtattgatatcaccggcgacagcgcgacggtggacaacaaaggtggaatgactgtcaccgatcctgactccatcggtattcagatcgacggcgacaaggcggtcgtgaacaacgacggtgacaacgccatcagcaacggcggcgccggcacgcaggttaatggcaacgaagccaccgtgaacaataacggcaacaccaccgttgacggtaaggattccacgggcaccgagataaacggtgacaaagccatcgtcaacaacgacggtgacagcacgatccttgatggcggcaccggaacccgcattacgggtgatgatgcgacggccaacaacagcggcaataccaccgttgatggtcagggttcgaccggaactgaaatcgcgggtaacaacgcggtggtgaaccaggacggcgagctggatgtgagcggcggcggtcacggtattgatatcaccggcgacagtgcaacggtggataacaaaggcggtatgaccgtcgcggatgcggattcgattggcattcagatagacggcgacaaggcggtcgtgaacaacgacggtgacaatgccatcagcaacggcggcaccggcacgcaggttaacggcgacgaagccaccgtgaacaataacggcaacaccaccgttgacggcaaggattccacgggcaccgagataaacggtgacaaagccatcgtcaacaacgacggtgacagcacgatccttgatggcggcaccggaacccgcattacgggtgatgatgcgacggccaacaacagcggcaataccaccgttgatggtcagggttcgaccggaactgaaatcgcgggtaacaacgcggtggtgaaccaggacggcgagctggatgtgagcggcggcggtcacgggattgatatcaccggcgacagtgcaacggtggataacaaaggcggtatgaccgtcgcggatgcggattcgattggcattcagatcgacggcgacaaggcggtcgtgaacaacgacggtgacaatgccatcagcaacggcggcaccggcacgcaggttaacggcgacgaagccaccgtgaacaataacggcagcaccaccgttgacggcaaggattccacgggtaccgagataaacggtgacaaagccatcgtcaacaacgacggtgacagcacgatccttgatggcggcaccggaacccgcattacgggtgatgatgcgacggccaacaacagtggcaataccaccgtagacggtcagggttcgaccggaactgaaatcgcgggtaataacgcggtggtgaatcaggacggcgagctggatgtgagcggcggcggtcacgggattgatatcaccggcgacagcgcgacggtggacaacaaaggcggcatgactgtcaccgatccggattccatcggtattcagatcgacggcgacaaggcggtcgtgaacaacgacggtgacatgccatcagcaacggcggcaccggcacgcaggttaacggcgacgaagccaccgtaaacaataacggaaaaccaccgttgaggtcagggtcgaccggaactgaaatcgcgggtaataacgcggtggtgaaccaggacggcgagctggatgtagcggcggggtcacggggttgatatcaccggcgacagcgcaacggtggataacaaaggcggtatgaccgttaccgatccggattccatcggtattcagatcgacggcgacaaggcggtcgtgaacaacgacggtgacagtgccatcagcaacggcggcaccggcacgcaggttaacggtgatgaagccaccgtgaacaataacggtaaaaccaccgttgatggtcagggctcgatcggtaccgaaatcgcgggtaataacgcggtggtgaatcaggacggtacactggatgtcagcggcggcggtcacgggattgatatcaccggcgacagcgcgacggtggacaacaaaggcggcatgactgtcaccgatccggattccatcggtattcagatcgacggcgacaaggcggttgtcaataacgacggtgacagtgccatcagtaacggcggcaccggcacgcagattaacggtgatgaagccaccgtaaacaataacggcagcaccaccgttgacggaaaagattccacaggcactgagattaacggtgacaaagccatcgtcaacaacgacggtgacagcacgatccttgatggcggcaccggaacccgcattacgggtgatgatgcgacggccaacaacagtggcaataccaccgttgacggacagggttcgaccggaactgaaatcgcgggtaacaacgcggtggtgaaccaggacggcgagctggatgtgagcggcggcggtcacggcattgatatcactggtgatagcgccactgtaatcaacaaaggcaatataactgtcacggataaagattcggttggtgtactgattaatggtgatcgagcgacctttgccaatacgggtcatattgacgtcaataattcagctactgggtttagcatcgcaaccagtgagggagttatctcattaactggcagtatggatgtaggtgacatctcaacaggaatggtgctcagcggagatggcaacagcgtgacgctggcagtagaagatcttaatgttactgggcagaaagcgatgggtgtcgacatttctggtgatagtaacgacattgatatcgctggcaatatcttggttgataaagatcaaactgcagataatgcggcagactatttcttcgagtcatctgtcggggtgaatgtcacgggtaacaataatacagtatctctaaatggcgaattaacagttgtctctgacagcgaattaacctcaagatctcatggcaagcgtgatgggagtcaagaaaatatctccgggctgattgtgtctggtgataataatacaataagcctaaatggcggtatacagtttatcggtgagcaaaaaatactggcggatggttcagatattgcatctctgcgtaaaggacttagtgatacctccataatcagcgttgatgggaactcatcagtatatttgaatgggacttcgacaataggtggcgaccttcctttaggctatacaagcattattcagttaaaaaataaagctatcctggaaattggtcgtgatgctttgttgggtgtaaaggatattaaatcgtttaataactattacgagccagtaccgaagattataaaggctactacaggttctaaggtcatcaataatggcaatatagatatccaaaatatcggttttatttcagtgtcaggtgaagatacgtcgggcactaataatggcaacattacgctatcacagtacgattacggcaacatgatgtcaggtactaatgctctgttaagtaccgatggaggcagtgttgttaacaacggcaccatcatcgggaaggtcatggagcaaagtagcgttattaatcgatttgagacgaccgacgttacttatgatgagttgtttaataatagcgttacgggcataaccggaatgctttctaaaaccggtgctatgggcattaataatgtaaacggcattattgatatgtatggacgcggtagcgtgggtatgttggcggttactcaagcgattatagaaaatgctggcaccatcaaactggactctctatgggttgatgctaacgataccactgcgttacccgataatatcgctatcagtaatgcccgttattatggtgcagggatggcggtaggttcagatagctatggtagcccggatgcaaatgtcacagctattaaccaattaggtggtgtgattagtgtctataatgctggggtcggtatggccgcttacggcggtagtaatatggttattaaccaaggtacgattaacctggagaaaaatgaaaactatagcagtagtctgagtgcaaatacgctagttggtatggcggtttatcaacacggcactgctattaacgataaaactggcgtgattaatattaatgtcgataccggccaggcgttttataacgacggtacagggacaatcctgaattatggtgagataaaccttctcggttctccaatggacagtgcagatccccatatgggggctaccccagataatctggatctgctgtcagcactaacaggcagcggcgaaacggatatgcgaactgcttcaagtggtgggtttgtgacgaccaaagcgctggcaaactacggcaatgaaacgctaaatagtaatgtgaccgccaaagcgtggctttataaccaggataaggccaatctgacaattaacggagagctatccgttgggcaagggctggaaaatagcggattactggattctgacaccattagtgcagcagcgaatgtctataaccgtgcatcgggtagcattattaccgacctgttaatgttaacgagtggtaactcgttttttaacgagggtaatttcagcggatctatagttggcaacagctataggcaaaatgtggttaataccggaagtatgacagtcacggctgatggtacatcgctcatcggcggcagctttgtgctttataacgaagcgggggcaatactcagcaacagcaacagcgccgtttcgggtggagaaaatgccattgttaacataacccgcaccagcgattcactcgcgcaagttaaccgcggcactattaccgcgaccaacggctacagtgcgattaaaacggcaagtacgggttctaacagcaacggaaaatggatctggaataccgatacgggtgtaattagcggcgtgagtcctaatgcactgttaattgatcttggtcgcggctataactttgccaacgcaggcactattaatgtgcagggtgatggtgcagtcgctatcagcgggggaaccaccagctatacggttcaactggtgaacagtgggaccatcaatgtcggtacggcgcagggtaaagcggacggcactaacggtactggtttaattggtatcaaggggaatggccgtgagacgacaattaataacgcacaaagcggtgtaattaacgtttacgcagataactcctgggctttcggaggacagactaaaacgatcatcaataatggtgaaatcaacctgctgtgtgatatgggatgtgatatttatgcaccgggcaccaccggtacactgaacgatcataacagtactactgatattattgttcctgccgcaacgagcacacctacgcaggggtcagtacccacagtacctgcggactccagtgcacagcaaaaactgactaactacactattggtaccaatagcgatggcacctctggtatgttgaaagccaataaccttgtcatcagcgacaacgtcaaggtaaataccggattcagtgcaggtactgccgacacgactgttgtgattaatgatgttttcaaaggtgaaaatatttccggggctgagaatatttcttcttccacggtaatgtggaatgctcagggcagcactgatgcaagcggcaacgtagacgtcacgatgaccaaaaacgcctatacggatgttgtgacggattcttcagttaataatgtcgctcaggtactggatacgggttacaccaataacgacctgtacactagtctgaacgtaggaacgactgctgaactgaacagtgcgctgaaacaaattagcggcagccaggcaaccacggtattcaatgaagcacgagtgttaagtaaccgtttcagcatgctgtcagatgctgcaccggaagttgcaaacggtctggccttcaacgtggtagcgaaaggcgacccgcgtgctgaactgggaaataatacacagtacgacatgatggcgctgcgtaaatccatgacactgactgaatatcagaatctgagtctggaatacggtattgcgcgtctggatggtaatggttcagataccgcaggcgataatggtgtgactggcggttacagccagttcttcggtctgaaacaccagatggcgtttgacaacggtatgagctggaataacgccctgcgttatgatgtgcataatctcgatagcagtcgctcgatagcttacggcgacgtcaataaaaccgctgatgctaatgtgaaacagcagtatctggaattccgtagtgaaggggcaaaaacctttgaactgcgtgaaggtctgaatgtgacaccttatgcgggtgtgaaactgcgtcacacactggaaggtggctatcaggaacgcaatgcgggtgactttaacctgagcatgaacagcggcagcgaaacggcggtggacagcatcgttgggctgaaactggactatgcagggaaagaaggctggagtgcgaacgccacgctggaaggtgggccgaatctgagctatgtgaaaagtcagcgaactgcgagcatttcgggcgcgggaagccagcgtttcaacattgatgatggtcagaatggtggtggtttcaacagcctggcgacaatgggtgtgaaatacagcagccaggaaagtgcgttgcaggtagatgcattccactggaaagaagacggcatcagcgataaaggtgtgatgctaaacttcaagaaaacattctaatttttagcatgtaatacataaaccgcaacgctgatacaggttgcggttttttattgccggatgcggtgcttgacgtgtcttaacctgcctggggtttcgtgtctttcaggacaacagtacaactcatcccgcaatcttgtttacaccctcgcattatttatctctattcatttctatactgatttttcttaatccgttgtattacagggcagggtgcgatgagcagcaacacatttactctcggtacaaaatccgttaaccgtcttggttatggcgcgatgcaactggctggtcctggggtttttggccccccaagagatcgccacgtcgctataaccgtgctgcgtgaggcgctggcattgggcgtcaatcatattgataccagcgacttttatggtccgcacgtcaccaatcagattatccgcgaagcgctttatccgtactctgacgacctgacaattgtcactaaaattggtgcgcggcgtggagaggacgcatcctggttacccgcattttctccggcagagctgcaaaaagcggtacacgataatctacgtaatctcggcctggacgtactggatgtggttaacctgcgcgttatgatgggggatggtcatggcccagcggaaggatcgattgaggccagcctgacagtgctggcggagatgcaacaacaaggcctggtaaaacatattggcctgagtaacgtcacaccgacgcaggttgcagaggcgcgaaagattgccgaaatcgtctgcgtgcagaacgaatacaacattgcccaccgtgctgatgacgcaatgattgatgctttggctcgtgatggcattgcctacgtgccattctttccgctcgggggctttacgccgctgcaatcctccacgctttccgatgttgctacaagccttaatgcgacaccaatgcaggtggcgctggcgtggctgttacaacgttcaccgaatattttgttgattcctggaacatcttctgttgcgcatttacgggagaatatggctgctgaaaaatttcatctttctgagaaagtgttgtctacgttggatggtatttcgcgagaataacgaatatacaaaagggaaagatgcatttcccttttgtttcttttttaatggcatggagtgcatatgtttaaggccaggatttgcggctggataatcagggaaaaggcgatggattcattgattcgtacagtgatagatggtatctcactgatatccagacggtaatcaaacagatgtgtagggcattcatccaccacatcttgatatattccgaatttacgttgatgctgcgcgttgtgatatctccgccgtcggaattgatgcaccatagagtaaactgaatatcacggaatgataaatgacgctctaccagataaaaccgctctttcagtcgctgttaaggccgacgatgttttggctttataagcaccatgttacagcgaatcacatcactcttgctgcactggcgctttctcttcttaccggattgctgttggtgttggtggcacaacccatcctctttttgctattgcccatcgtgctttttatccgtatgacgctcaatgcgctggatggcatgttggcgcgtgagtgcaatcagaaaacacgtctgggggcgattttgaatgaaactggcgatgttatttccgatattgcgctctatttaccgtttttatttttaccggaaagtaacgcatcactcgtaatactcatgttattttgcaccatattgaccgagttttgcggtttactcgcgcagacgattaacggtattcgtagttatgtcggtccatttggcaaaagcgatcgcgcgttaatatttggtctgtgggggctggccattgccatttatccacaatggatgcaatggaataatcttttatggagcattgcttcaattctgcttctctggactgcgattaatcgttgtcgaagtgtgctcctgatgagcgctgaaagataatgctggaaaaatctctggcaatactcttcgcgttgttaattttagcaacgctgataaaccgttttctggtatggcggttaccggagagaaaaggcgatgaagtaacattacgtattcgtacctggtggggcatcgtcatttgtttttcactggtgatttcaggtccacgctggatgacgttgacgttttttgcgctgataagttttctggcattgaaagaatattgtacgcttatatccgtacattttccgcgttggttatattgggttattcctcttaactatttgcttatcggttttaattgctttgagctgtttctgttatttatacctttggctgggtttctgatattagccacctggcgagtttttgtaggtgacccctctggttttctgcataccgtgagtgccattttttgtggctggataatgaccgttttcaccttgagtcatgccgcctggttattaatgttgccaaccataaatatccagggcggggcgttactggtgttatttcttttggcgttaaccgagtcaaacgatattgcacagtatttatggggaaaatcctgcggcagaagaaaagtggtccccaaagtcagcccgggaaaaacgctggaaggtctggtgggaggagtaatcaccaccatgattgcgtcactgattattggaccgttactgacaccgctaaatacattacaggtattattagcgggtttgttaattggtattagtggtttttgcggcgatgtagtgatgtcagccaccaaacgagatgttggtgttaaagatagcggaaaactattaccaggacatggcggactccttgacaggattgactcattaattttcaccgctccggtatttttttattttattcgctactgctgttactgaaggaaaacagagaaaatggaaaattcacgcatccctggggagcatttttttaccaccagtgataatacagcgttgttttatcggcactggcccactttactgccaggggcgaaaaaggtcatcgtcttatttcatcgcggtcatgaacattctggtcgtctacaacatatcgttgatgaactggcgatgccagatactgctttttatgcatgggatgcccgagggcatggacaaacttcggggccgcgtggttatagtccgtctcttgcgcgttcagtgcaggatgttgatgaatttgtccgttttgctgccagcgacagccaggtcggactggaagaggtggttgtgatcgcgcaaagcgtcggcgcagtgatggttgccacatgggttcatgattatgcgcctgctattcgcggactagtgctggcatctccggcctttaaggttaaattgtatgtgccgctggcacgtcctgggctggcgttatggcatcgtctgcgtggtctgttttttattaattcctatgtgaaagggcgttatctgacccacgatcggcaacgggtggcgagtttcaataatgatccgctgatcacacgggcgattgccgtcaatatcttgctcgatctctataaaacgtctgaacgtattgttagcgatgcggcggcgattacgctccccacgcaacttctgatatcaggcgatgactatgtggtgcatcgccaaccgcagattgatttttatcagcgtttacgtagtcctctgaaagagctgcatctgctgccaggcttttatcacgacacgttgggtgaagagaacagggcgcaggcatttgaaaaaatgcaaagctttatcagccgtttatatgctaacaagtcgcaaaaatttgattatcagcatgaagaccgcacaggaccatcagcggatcgatggcggctcctttctggtggacccgtgccgttatcgccggttgatttggcgtatcgctttatgcgaaaggcgatgaaactgttcggggcgcactctgcgggcctgcatctcggaatgagtaccggctttgattcaggcagttcgctggattatgtctatcaaaatcaaccgcaaggcagtaacgcattcgggcgctttatcgacaaaatctacctgaacagtgttggctggcgcggtattcgccagcgcaaaacccatttacaaatgctgattaaacaagccgttgcccatctccacgccaaaggtttagccgtccgcgtggttgacattgccgcagggcatgggcgctatgtactggatgcgctggcaaacgagcccgccataagcgaaattttgttacgtgattacagtgaggtaaatgttgcacaagggcaagagatgattgcccaacggggaatgtctgggcgggtgcgttttgaacagggcgatgcgtttaacccggaggaactcagcgcgttaactccgcggcctacgctggcgattgtctctggcctgtatgagcttttccccgaaaatgagcaggtaaaaaactcactcgcaggtcttgccaatgccatcgatccgggtggcattctcatctacaccgggcagccgtggcacccacaactggagctgattgccggggtgttaaccagtcataaagatggtaaaccgtgggtaatgcgcgtgcgttcgcaaggggagatggattcgctcgtgcatgatgccggattcgataaatgcacacaacggattgatgtgtggggcatttttacggtttcgatggcggtgcgtcgtgataactgaacgccggaacgtattgctacaaggagctggctggttattgttgctggccccgtttttcttctttacatatggatttcttaatcagttcaccgcgactcaggatcttaacaaccatgatatccccagtcaggtattcggttgggaaacggcgatcccttttcttccctggactattgttccttactggagtctggatcttttatatggattttcgctgttcatttgtagctcgacattcgaacagcgccgactggttcaccggcttattctggcaacggtaatggcctgctgcggtttttttctctatccgctgaagtttagttttatccgtcctgaagtgagtggggtgacaggatggctattttcgcaacttgaactgtttgatctgccttataaccagtctccttcgctgcatattattctctgctggctactttggcgtcactttcgtcagcatctggctgtgaggtggcgtaaagtctgcggcggatggtttttactcatcgccatttcgacgctgacgacctggcagcatcattttattgatgtcatcacggggctggcggtaggtatgttaattgactggatggtgcccgtcgaccgtcgttggaattatcagaaacctgatcaacgtcgaatcaaaatagcactgccatatgtcgcaggcgcgtgctcgtgcattgtgttgatggagctaatgataatgcttcagttatggtggtcagtctggttatgttggccagtattatcgctattcatcattggccgtgggtacggtgggcttggcgcgataacaacagggaaagatagtcaggggaaactcccgcccgccgtttactggctgacattgccctggcgtatcgggatgtggctgtctatgcgttggttttgtcttcgcctggagccggtgagcaaaattactgctggtgtttatttaggggcgtttccacgacatattccggcacagaatgcggttctggacgtcacctttgaattccctcgcggacgagcgacaaaagatcgactctatttttgtgtaccgatgttggatctggtggttccggaagagggggagctccgacaggccgtggcgatgctggaaacattacgcgaagagcaaggcagcgttctggtccattgcgcgttgggattatcgcgcagtgcgctggtggtggcggcatggctgttatgttacggacattgtaaaaccgttgatgaagtgattagttatattcgagccagacgctcgcggattgtgcttaaggaagagcacaaagcgatgctgaaattatgggaaaacaggtaagcggattgagatgtggactgaatatctacagtccacatcaagatcgtgtccggttattcagcaacaatactgtcgatggctgctttcgcgtcagactgtgctttcgctgccatttccgggccgtacgcgatcccttcggcgaagacaaatttcacatcggtaatgccgataaagcccaggaatgtggacagatatggcgttaccagatccgttgggccatctttatggatcccaccgcggctggtgataacgatggcttttttaccggtgaccaggccttccggacccttctcggtatagcggaaagtaacgcctgcgcgtgcaaccaggtcaaaatagtttttcaactgagtcgagatgttgaagttatacatcggtgccgcaataacgataacgtcgtgggctttcagctcggcaatcagctcatcggaaagcgccagagcttcctgctgacgcggagtcagcggcgcatcgctcggacgcagtgcaccaaccagttcgccatccaggaccggaatcggatttgtagccaggtcacgcacggtgatttcatcagcggagtgcttttcgcgccattgttcaacaaaataatcggacaactgattagactgagagtaccctgccaggatgctggatttaagaactaataccttgctcatggtgtttccttatagatatttgaatgggcaatgccccgttgcttgttgacactttattcacaatcttgccacagagatagcgcaataaatcgaagcctatgttcgaatttattgaacaacgcatagaaagccgcgatgtggtactctatatctatcatttaaaagaaaattaatcaggcagactactgcccactaacgttatgacagaacaacaaaaattgacctttactgccttgcagcagcggctggattcgctgatgctgcgtgacagactgcgtttttctcgccgtctgcacggcgtgaagaaggttaaaaatcctgatgcacaacaggccattttccaggagatggcgaaagagattgaccatgcggcagggaaagtcctgctgcgtgaagcggcacgaccggagattacttacccggacaatttgccggttagtcagaaaaagcaggacattctcgaagcgattcgtgaccaccaggtggtgatcgtcgccggggaaacgggttccggtaaaacgactcagctaccgaaaatctgtatggagctgggtcgcgggattaaagggctgatcggccatacccagccgcgtcggctggcggcgcgaacggtggcgaaccgtattgcggaagagctaaaaacggagccgggcggttgcatcggttacaaagtgcgtttcagcgatcacgtcagtgataacacgatggtcaagctgatgaccgacggtatcctgctggcagagatccagcaagaccgcctgctgatgcagtacgacaccatcattattgacgaagcgcacgaacgcagcctgaatatcgattttctcctcggctatttgaaagagttgctgccgcggcgtcctgacctaaaaattattatcacctccgcgactatcgacccggaacgcttttcgcgccactttaataatgcgccgattatcgaagtctccggtcggacctatccggtggaagtgcgctatcgcccgattgttgaagaagccgatgacaccgagcgcgaccagttgcaggcgatttttgacgccgtagatgaactgagccaggaaagccctggcgacattctgatctttatgagcggcgagcgagaaattcgcgataccgccgatgcgctgaacaagctgaacttacgccataccgaaatcttgccgctttatgcacggctttccaacagcgaacagaaccgcgtgttccagtcgcacagcgggcgacgcattgtactggcgaccaacgtcgcggaaacctcgctgaccgtaccgggtattaaatacgttatcgacccaggtacggcgcgtatcagccgctacagctatcgcaccaaagtgcagcgtttgccgattgagccaatttcgcaggcttcagctaatcagcgtaaaggccgctgcggtcgtgtgtcagaagggatctgtattcgtctctattccgaagacgatttcctctcgcgcccggagtttaccgacccagaaattctgcgtactaacctggcctcggttattttgcagatgaccgcactgggcttgggcgatatcgccgcattcccgtttgtcgaagcaccggataaacgcaatatccaggatggcgtgcgtctgctcgaagaactgggtgcgatcaccacggatgaacaggccagcgcctataaactgacgccgctcggtcgccagctctcgcagttgcctgtcgacccacgtctggcgcgtatggtgctggaagcgcaaaaacatggctgcgtgcgtgaggcgatgattatcacgtccgcgctctccattcaggacccgcgtgagcgtccgatggataaacagcaggcatctgacgaaaaacatcgtcgcttccacgacaaagagtctgacttcctggcatttgtgaatctgtggaattatcttggcgagcagcaaaaggcgctttcttcaaacgccttccgtcgcctgtgtcgtactgattatctcaactatctgcgcgtgcgcgaatggcaggatatctacacccagttgcgccaggtggtgaaagaacttggcattccggttaacagcgaaccggcggattatcgcgaaattcacattgcgttgctgaccggtttgctttcgcatatcggcatgaaagatgccgataaacaagaatataccggcgcacgtaacgcgcgtttctccatcttccccggttctggtttattcaaaaagccgccgaaatgggtaatggtggcggaactggtagaaaccagccgcctgtggggacgcattgctgcgcggatcgacccggaatgggtggagccagttgctcagcatttgattaaacgcacctacagcgaaccgcactgggaacgggcgcagggcgcggtgatggcaacggaaaaagtcactgtttatggtttgccgattgttgctgcgcgtaaggtcaactacagccagatcgatccggcgttatgtcgtgaactctttattcgccacgcgctggtggaaggtgactggcagacgcgtcacgcattcttccgtgaaaacctgaaactacgggccgaagtggaagaactggaacacaaaactcgtcgccgcgatattctggtggatgacgaaacgctgtttgagttctacgaccagcgcatcagccacgatgtgatttccgcacgtcacttcgacagctggtggaaaaaagtcagccgcgaaacgcctgatttgctcaactttgaaaagagcatgttgatcaaagaaggggcggaaaaaatcagcaagctggattacccgaacttctggcatcagggcaatctcaagctgcgtttgagctatcagtttgagcccggcgcggatgctgacggtgtgaccgtgcatatcccgctgccgttacttaaccaggttgaggagagtgggtttgagtggcagatccccggtctgcgtcgtgagctgatcatcgccctgattaaatcgctgccgaagccggtacgccgtaattttgtgcccgcgccaaactacgccgaagcgtttttaggccgcgtcacaccgctggaattgccgttgctcgacagccttgaacgagagttacggcggatgactggcgtcaccgttgaccgcgaagactggcactgggatcaggtgcccgatcacctgaaaatcactttccgcgtggtggatgacaaaaacaagaagctaaaagaagggcgctcattacaggatctgaaagacgccctgaaaggcaaagtgcaggaaacgctgtctgccgtggcggatgacggtatcgagcagagcggtttacatatctggagttttggtcaactgccggaaagctacgagcagaagcgcggcaactacaaagtgaaggcttggccggcgctggtggatgagcgtgacagcgtagcgatcaaactgtttgataacccgctggaacagaagcaggcaatgtggaacggtcttcgccgtttactgctgctaaatattccctcgccaatcaaatatttgcatgagaagttgccaaacaaagccaagctggggctgtactttaacccgtatggcaaagtgctggagctgatcgacgactgtatctcctgcggtgtggatcaactgatcgacgccaatggtggcccggtctggacggaagaaggctttgctgcgctgcatgaaaaagtccgcgctgaactgaacgacacagtggtggatattgcgaagcaggtcgagcaaatcctcactgcggtgttcaatatcaacaaacgtctgaaagggcgggtggatatgaccatggcgctggggctttctgacattaaagcgcagatgggcgggctggtgtatcgcggttttgtcactggtaacggttttaaacggttgggcgacacgttacggtatttgcaggcgattgaaaaacgactggaaaaactggcgattgatccgcatcgtgaccgtgctcagatgctgaaagtcgaaaacgtccagcaggcatggcagcaatggatcaacaaactgccgcctgcacgtcgtgaggatgaagacgtgaaagaggtccgctggatgatagaagagctgcgcgttagttacttcgctcaacaacttggcacgccttatccgatttcggataagcgtattttgcaggcgatggagcagattagcggttaacactgctatttgcctgataaatctaaaacccggtaagcatttagcgccgggttttttattaattctaaaaacgataagggaaaaaattcaggagttcagaaaaatacaattctctgctgcaagatgaataatgtttatctacagcatttccttaaaaaatatgtcaggcttgcggagtggcagttaaggaaatacgacttcctcctttcagagtgctccgcttctcactattatctcacgcagtattcttaagggaaggataaggaggaaccatgaatattaccccgtttccgacactttcgccggcaaccatagatgccataaatgttatcggacagtggctggtgcaggatgatttctccggtgaggtaccgtatcaggccgattgcgtgatccttgcaggcaatgcggttatgccgactatcgatgcggcatgtaagattgcccgcgatcagcaaattcctttactgattagtggtggtatcggtcactcgacaacttttttgtatagcgccatcgcacagcatccgcactacaacactatccgcaccactggcagagctgaagctaccatcctggcggatatcgctcatcagttctggcatattccgcatgaaaaaatctggattgaagaccagtcaacaaactgcggtgaaaacgcacgctttagcatcgcgctattgaatcaggccgtagaacgagttcatacggctatcgttgttcaggaccccaccatgcagcggcgcacgatggcgacgttccgccgtataaccggggataatcccgatgcaccgcgctggttaagttatcccggattcgttcctcagttaggaaataacgcagacagtgtaatctttgttaatccgttgcaaggattatggccggttgagcgttatctatcgctactcactggcgagttgccgcgtttacgcgatgatagcgatggctacggcccccgcgggcgagattttatcgttcacgttgattttccggcagaagtcatccaggcatggcaaacgctgaaacacgatgcggtgctcatcgaggcgatggaaagtcgctcgttacgttaaaaattgcccgtttgtgaaccacttgtttgcaaacgggcatgacttctgacttttatttctgcctttaattccttttacacttgtttttatgaagcccttcacagaattgtcctttcacgatgccgtctctctgataattgatgttaattaacaataaatttaccaaaaacaaacatgcaaatcacaggagtcgcccatgtcagtacccgttcaacatcctatgtatatcgatggacagtttgttacctggcgtggagacgcatggattgatgtggtaaaccctgctacagaggctgtcatttcccgcattcccgatggtcaggccgaggatgcccgtaaggcaatcgatgcagcagaacgtgcacaaccagaatgggaagcgttgcctgctattgaacgcgccagttggttgcgcaaaatctccgccgggatccgggaacgtgccactgaaatcagtgcgctgattgtcgaagaagggggcaagatccagcagttggctgaagtcgaagtggcttttactgcggactatatcgattatatggcggagtgggcacggcgttacgagggcgagattattcaaagcgatcgtccaggagaaaatatccttctgtttaaacgtgcgcttggcgtgactaccggcattctgccgtggaactttccgttcttcctcattgcccgcaaaatggctcccgctcttttgaccggtaataccatcgtcattaaacccagtgaatttacgccaaacaatgcgattgcattcgccaaaatcgttgatgaaataggccttccgcgcggcgtgtttaaccttgtactcgggcgtggtgaaaccgttgggcaagaactggcgggtaacccaaaggtcgcaatggtcagtatgacaggcagcgtctctgcaggtgaaaagattatggcgactgcggcgaaaaacatcaccaaagtgtgcctggaattggggggtaaagcaccggctatcgtaatggacgatgccgatcttgaactggcagtcaaagccatcgttgattcacgcgtcattaatagtgggcaagtgtgtaactgtgcagaacgtgtttatgtacagaaaagcatttatgatcagttcgtcaatcggctgggtgaagcgatgcaggcggttcaatttggtaaccctgctgaacgcaacgacattgcgatgggaccgttgattaacgccgcggcgctggaaagggttgagcaaaaagtggcgcgcgcagtagaagaaggggcgagagtggcgttgggtggcaaagcggtagaggggaaaggatattattatccgccgacattgctgctggatgttcgccaggaaatgtcgattatgcatgaggaaacctttggcccggttctgccggtggtcgcatttgacacgctggaagaggctatctcaatggctaatgacagtgattacggcctgacctcatcaatctatacccaaaatctgaacgtcgcgatgaaagccattaaagggctgaagtttggtgaaacttacatcaaccgtgaaaacttcgaagctatgcaaggcttccacgctggatggcgtaaatccggtattggcggcgcagatggtaaacatggcttgcatgaatatctgcagacccaggtggtttatttacagtcgtaatgagtgaaagaggcggaggttttttcctccgcctgtgcgcgtcagagtttagcgaatttttcgagggtgcgaataagctgcgtgacgaagccatattcgttatcgtaccaggcgaccgttttcaccagttgtaaatcgcccacggcggtaatttccgtttgcgtggcatcaaacaccgaaccgaaatggctgccaatgatatcggaagagactatttcttcatcggtataaccaaatgactcgttattgtttgtcgcctttttaagcgcgttgttcacctcttcggcagtcactttttttccgagaatcgacaccagttcagtgaccgaacctgttttcaccggcacgcgttgcgcatgacctttcagtttgccgctcagttccgggatcaccagaccaatggcttttgccgcccccgtagtgtggggaatgatattttctgccgctgcgcgtgaagcacgtaaatctttaccacgtgggccatccaccagtgactgggtgccggtataggcatgaatggttgtcatcgtgccgacttctatcccgaaactgtcatgcaaggctttggccatcggcgcaaggcagttagtggtgcatgacgccacggaaacaatggtgtcgttgccatccagagtgtcgtcattgacgttataaacgatggttttcatttcaccggcaggggcggaaatcaacaccttcttcgcgccagcatcaagatgcgcctgcgatttctcggcggaggtataaaagcctgtacattcgacaatgatttctgcgcctttcgctttccacggaatatttttagcctctttttcggcgtaaaccgcgatacttttcccatcaacgataagtgaatcttccgtataatcaacgctccaggggaacggtccgtagtttgaatcatgtttcagcaggtaggcgagaatttttggggaagtgagatcattaatagcgacaacgtctatgttgcttttgacttcaagtaatcgacgcaacaccagtcgaccgatacgaccaaaaccattaataccaactttactcatggtcttctcctgtcaggaacgttcggatgaaaattgatcctttccaggcttagaccaggatggcgggatgggcaatctacattcttgcagcgaaacgtaacgtactgaaaacaggtgaacaatatttaatgaaattttaagaaaagcccgttatgttaacggcaaattatgttaaagcaggaaatgttatgggaaataaatactcaaggttacaaatcagcattcactggctggtctttttgctggttatcgtagcgtattgcgcaatggagtttcgtggtttcttcccacgtagcgatcggcccctcatcaacatgattcatgtttcctgtggcatctcaattctcgtactgatggtggttcgtcttttgttaaggctgaaatgcccaaccccgccgattatacctaagccaaaaccgatgatgacgggactggcgcatttgggccatttggtgatttatctcctgtttattgcgctgccagtgattggtttggtgatgatgtataaccggggcaacccgtggtttgcgtttggtttgacgatgccttacgcttcagaggccaatttcgaacgggttgatagcttaaagtcgtggcatgaaacgctggcgaatctgggatattttgtcatcgggttgcacgctgcggctgcactggcacaccactatttctggaaggacaacacacttctacgcatgatgccacgtaaacgttcctgaaggatatttaaagaaaacgcctgtactaaaaccgacccgtggtacaggcgaagaatacgggcctacatcggaagcgcctattatatttatttgtatgacaaataaaaccataatccttgtctatacgtccatctggcttatctttaatcaattcacccgatctttgatctcatcaacggtatcaaaataaaccagcgtataacgttcaaatcgaacataagattcgataaatcatggaggttatatgaaaaaactggcacttatcctggttatgggaacgcttgtttccttttatgccgatgccgggcgcaaaccctgttctggttcgaaaggggggatctcacactgtacggcaggcggcaaatttgtctgtaatgatggttctattagtgcatcgaaaaaaacatgcactaactgaagtgtaaaaggggtgccatgagaaaatgaatccgctagtcagatgcgcggggaaaatccccgcgcttgcccttacctggacgtgcaggccatgagcgcagcaacctccttatcaccgtcccggaaccgcagttcgtagagcgtttgtcgggtcagtgtgaatgtcagaatcgtgttactctcgcaaggccctggatttgccgttgtcgccagcgaagtacggacactcgcaagccgcagcgctcaggcggcgaaagagattgaaggcttgatcagtgaatcagtcaggttaattgacctgggagcggatgaggtggccacggccgggaaaaccatgagcactattgttgatgccgtcgcgagtgtcacacatatcatgcaggaaatcgccaccgcctcggatgaacaaagtcgaggcataacgcaggttagccaggcgatttctgaaatggataaggtgacgcaacagaatgcttctctggtagaagaggcctcaacggcggcgttgtcccttgaagaacaggcggcacgactaactgaggcggtggacgtattccgtctgaacaaacattctgtgtcggcagaaccacgaggagctggtgaaccagttagttttgctacggtgtgaaaatgttaaaggagggatcgacagatcccttcacctttcagaacggcattgattttcgaatagcgttaatcatcaactggcaaccagaagagaacgtcgcatctacgcgggtcagtattccaatcggttcgcctgcaccatgtcccggaacaggcagggctaccagcgtggcatgacgcaggtcgtcttttacagcgccagaagggacaaaccacacgtaatcgtattcaaccgtaagttgacgagatagcgaagcagacagcgtttcgatacaacccgaaggaattttacatccctggctctgcactaatgcatctgaatgctggcgtggcgcagtgccttctggtgatacaacgaccggccattccagcacccggcttagcgttacgttctcctgaagtagcgggtgattagggcggacaaccagcttcagcgattcaagaaacagcagttcataattaagcccgttcatcagttcaggatctgacatccgaccaatgccgatatcgatttccccggtttttaaacccgccagaatcatagggttactcattgtcgcaacttgcaaggtcgtctctttttgttgctgatgaaactgacctataaccgaaggtaatatccctagtgccgcagtaggtagcgcaccaaccctgacgacatcattattaagaccttctttacgatgaagcgactgtccggcagtgttgatggcgtcaagaactctgactgcatgcgttaaaaattgttcgccgggtaaggtaagttgcgccccctgacgaccacgctcaaacaagcgagcgcccgtcagctgctccagttcattcaatgtcttagagagcgcaggttgactcaaattaagggtttcagccgcgcgccccaaagttccttgttgtgcgacagctacgaatgtatgaaggtggcgcaaacggatgcgctgactaaacagactatttttttccataagcgatgttaaaaacgaagcggtgtcgctgacaagtgaagttgttttattatgataacttgattgcaaaatattattaacaattaaagcaactatgttacagcaaaatggataatattgatgttttcgcggcgagatcacagtttgtaaattcttccagccggagtgaatgcggttacctacactccagattactgaccactggaggcagacactatggcgaacagcatcacggcggatgagattcgggaacagttttcgcaggcaatgtcagccatgtaccagcaagaagttccgcagtacggcacgctgctggaactggtagctgatgtaaatctggcggtgctggaaaacaatcctcaactgcacgaaaaaatggtaaatgcagacgagctggcgcgactgaatgttgaacgtcatggggcgattcgcgttgggactgcacaagagcttgctactcttcggcggatgtttgccattatggggatgtacccggtgagctattacgatctctcgcaggcaggggtgccggtacattcgacagcatttcggcccattgatgatgcttctctggcgcgtaatcccttccgcgtttttacctcgttactccgtcttgagcttatcgagaacgaaattttgcgccagaaagcggcggagattctgcgtcagcgcgatatcttcaccccacgttgtcgacaactgttagaggaatatgagcagcagggcggttttaacgaaacacaggcacaggagtttgtgcaggaagccctggaaacgtttcgctggcaccagtcagcaacggtagatgaagaaacctatcgcgccttgcacaacgaacatcggttgattgctgatgtggtctgttttcctggatgccatatcaaccatctgacgccacgtacgctggatattgaccgggtgcagtcgatgatgcctgaatgcggaattgaacccaaagttctgatcgaagggccgccgcgccgcgaggtgccgattttactacgccagaccagctttaaagcactggaagagacggtgttgtttgcggggcagaaacagggcacacataccgcgcgctttggtgaaattgagcagcgtggtgtggcattaacgccgaaagggcgacaactgtatgatgatcttctgcggagcgctggaaccgggcaggataatctcactcaccaaatgcatttacaggaaaccttccgcacttttcctgacagtgagtttttaatgcgtcagcaagggctgggatggttccggtaccgtctgacgccttcgggtgaggcgcatcgtcaggcgattcatcccggagacgatccacagcccttaatagaacgtggttgggtagtggcgcaacccattacctatgaagatttcttgcccgttagcgcggcggggatcttccagtcaaatctgggtaatgaaacgcaggcatgcaatcacggtgatgccagtcgcgaagcatttgagcaggcgttggggggtccggttttggatgagttccagctttatcaggaagcggaagaacgcagtaaacgtcgctgtggtttgctttaaattctgaccatccgcctttgcaaaaatttgcctgattttacaaacgaatcaggctcatcccatcgacataaaaaaaatgccaatttatgcatattctctgatttcaacaattggattattaataaatattgtctagagtgagcggtcataaataagcactttcttgccgctgaaaatgaccagcgcgggaccattcacaacaccagaaggactcactttcaggtatggatcgtagacgatttattaaaggttcaatggctatggccgccgtgtgcggtaccagcggcattgcttctcttttttctcaggcggcattcgcggccgattctgatattgccgacgggcaaacccagcgttttgacttctccattctacagtcaatggcgcacgacttagcgcaaacagcatggcgtggtgcaccacgtccgttacctgacactttggcgacaatgacgccgcaggcttataacagtattcaatacgacgccgaaaaatcgctctggcataacgttgagaaccgtcaactggacgctcagtttttccatatgggaatgggattccgtcgccgcgttcgtatgttttctgtagatccagcaacacatctggcgcgtgaaattcactttcgcccggagttgttcaaatacaacgatgcgggtgtggataccaaacaattagaagggcaaagcgatctcggttttgccggttttcgcgtgtttaaagcccccgaactggcgcgccgtgatgtagtatcattcctcggcgcgagttatttccgcgccgttgatgacacatatcaatacggtttgtcggcccgcggcctggcgatcgacacttacaccgacagcaaagaagagttccccgactttaccgccttctggtttgatacggtaaaaccaggggcaaccacctttactgtttatgcgttgctcgatagcgccagcattactggtgcctataagttcactatccattgtgagaaaaatcaggtgattatggatgtggaaaatcacctgtatgcgcgcaaagacattaaacagctgggcattgcaccgatgaccagtatgttcagctgcggtactaatgaacgtcggatgtgcgacaccattcatccgcaaatccatgactctgatcgtctgtccatgtggcggggcaacggcgagtggatttgccgtccgctgaacaatccgcaaaaattgcagttcaatgcttacaccgacaacaacccgaaagggtttggtttattgcaactggatcgtgatttctcccattatcaggacattatgggctggtataacaaacgcccaagtctgtgggtggaaccgcgtaacaagtggggtaagggcaccatcggcctgatggaaatcccaacaacgggcgaaacgctggataacattgtctgcttctggcagccagaaaaagctgtgaaagcgggtgatgagtttgcattccagtatcgtctgtactggagtgcgcaaccgcctgttcattgcccattagcgcgcgttatggcgacgcgtaccggcatgggcggtttcccggaaggttgggcgccaggtgaacactatcccgaaaaatgggcgcgacgttttgccgtcgatttcgttggtggtgatctgaaagctgccgcgccaaaaggcattgagccggtgattacgctttccagtggggaagcgaagcaaatcgaaattctctatattgaacccattgatggttatcgtattcagtttgactggtatccgacttcggactccactgatccggtcgatatgcggatgtatctgcgttgtcagggcgacgctatcagtgaaacatggctgtatcagtatttcccgccagcgccggataaacgtcagtatgttgatgaccgcgtgatgagttaatcattttttcttcggcatcttcttcgggaggtgccgtctggttaaacacgatcccgctcgcatttttccctaagttaaatgagtaatctgatggtgtgtatttcagatacaccttgtcagccactaacagggagtgcgtatgtttccagaataccgagatttaatatcccgtctgaaaaacgaaaatcctcgctttatgtccttgttcgataaacacaataaacttgatcatgaaattgccagaaaggaaggttccgacggtcgagggtacaatgcggaagtggtccgcatgaaaaaacaaaagctacagttaaaagatgagatgctcaaaatcctgcagcaggtgagcgtcaaagaggtgtaaactttcctaagccgccagccaggcggcttttttaacaactgcatggattgactggagataagatgaccgaaacgataaaagtaagtgaatcacttgaattacatgctgttgcagaaagtcatgtcacacctctttatcagttaatctgtaaaaatagaacctggttacagcagtcgctaaactggccgcagtttgttcaaagtgaagaggacacgcgaaaaactgtgcagggcaatgtaatgttgcatcaacgcggatatgccaaaatgttcatgattttcaaagaagatgaacttatcggcgttatctcgtttaatcgtattgaaccactgaataaaaccgctgaaatcggctactggctggacgaatctcatcaggggcaggggatcatttctcaggcgctgcaggcattgattcatcattacgctcagtctggtgaacttagacgcttcgtgatcaaatgtcgggtggataatgcgcaaagcaaccaggtcgctttgcgcaatggttttatccttgaaggttgtctgaaacaggctgagttcctgaatgatgcctatgatgatgtgaacttatacgcgcgtattatcgattcacaataaccctgccagcggcgttcgagtaatgcgctcctcgccgttaatgacttttggaccacggacatgaaccgtgtcgccatcaaaggcttcaacgacggcgtggtcggttaactccacatggttttcaattatcaccgcaccagtaatacggctctcaccttgtatgacaacgtcctcgtcgagcagaatcggtccgccacataccacggcatttccgccaatcaagacatgatgttttaacacacaattaccttccacaatggcatattccgccacctgcgaactgtaatgaatcgtcggaatggcatcttcttctatgccagctttcacctgcgcgtgaccgtaaactttagcacaatcgcatagccagacgttgttctcttcattaccttcaatactggcaaaatcaaaaacttcggcgcgatgttcaataaaagcataccggacgacggcatcgccataaatttgtgcctggtggacaatccgcgaggcgctaaccctcgcgcgatcataaatttgtagcaggagttgatggtcgggcgttaagccttgtgcggcgacgatcatagaatgttgatcaattaaggcgtgaccaaatattctacattgaccgcaaactaatgagtcactaatggtgacactgtcacttatatatgcaccctggctgatttcactattatcgatccagacattatccgttgcgtaaacctctccccacagcacgctggtgccggtgatacgcgtattcccggaaatcaccgttccgccgaacgcaatagcattctggtcgtaaatccagcaatttccttcctgtgctaacaccgtttcgtgatcgatccagccgccagcgcttcctgctatcacatcgttaaaatcgctcatggcgataatttgccgtaataacacactttttttagtgccatcttcctgataactaaaggctcgctgttcttcacttagacgatatttacgcatagcgttttcccacaggtgacttactataaccgtagcaaattctgcggctctggctatgctcgagaaaattccataaaatgcatttcaaatatactttataaattaaacaaaatgagtaagaagatgcagagcgataaagtgctcaatttgccggcaggctactttggtattgtgttggggacgatagggatgggatttgcctggcgctatgccagccaggtttggcaggtcagccactggttgggggatgggctggtgattctggcgatgatcatctggggattattgactggcgcatttattacccgactcatacgctttccgcatagcgtgctggcagaagtgcgccatccagtgctgagcagttttgtgagtttgtttccggcaacgacgatgctggtggcgattggttttgttccgtggtttcgcccactggcggtgtgcctgttcagttttggtgtcgtggttcagttggcttatgccgcctggcaaactgcgggattatggcgcggatctcaccctgaagaagctaccacgcctggactgtatctgccgacagttgccaacaactttatcagcgcaatggcctgtggtgcgttgggctacaccgacgccggtctggtgtttttaggcgcaggcgttttctcatggctaagcctggaaccggtgatcttgcagcgtctgcgcagttcgggagaattacccacggcactgcggacatcactcggcattcagctcgctcctgcgctggtggcctgtagtgcctggctgagcgtcaacggcggcgagggtgacacgctggcgaaaatgcttttcggttatggactgctgcaactgctgtttatgctacgtctgatgccatggtatctctcccagccatttaatgcttcattctggagtttctcgttcggtgtatctgcactggcaaccaccggtttgcatctggggagtggcagcgataatggatttttccatacgctggcggtgccgctgtttatctttaccaattttattattgcaatactgctcatccgtacttttgcgcttctgatgcagggaaaattgttagtcagaaccgagcgcgccgttttaatgaaagcagaggacaaagaatgatcattcgtgatgaaaactattttactgataaatatgaattaacccgcacacactctgaagtgctggaagcggtgaaagtggttaaaccgggtaaaacgctggatctgggctgtggcaatggtcgtaacagtctttacctggcagccaatggttatgatgttgacgcatgggataaaaatgccatgagtatcgccaacgtcgagcgcattaagtccattgaaaatctggataatttacacacccgggtcgttgatctgaataacctcacatttgatggacagtacgattttattctttcgactgtggtgctgatgttccttgaggctaaaaccatcccagggctgattgccaatatgcaacgttgcactaaacctggcggttacaacctgattgtggcggcgatggataccgctgattatccatgtaccgtcggcttcccgtttgccttcaaagagggggaattacgtcgatattacgaaggctgggagagggtgaaatacaatgaagacgtcggcgagctgcaccgcaccgacgccaacggtaatcgtattaaactgcgtttcgccacgatgctggcacgtaaaaaatgatccggtaagaacaaagcgcgtgaaaattccccacgctgagatagtttactgttcttcttttcggtaagcatattttttatcgaagggatgtgaaattaatcacagtagtcgaagttttttagccgcttaacttactgaaatttaactactgatgattgacttagcccctttttcggcattgactatgtcgtctgaaaaggggctaaaaaatttattttcaccaacactttttttgccacaacacgaagcggcgctttttgctataacttagaaagtaatataatcatctcaggaaactattcatgcgtaccacatcatttgcgaaagttgcagctttatgcggcttgttggctctgtctggttgtgcctctaaaatcacccagccagataaatattctggttttttaaacaattactctgatttaaaagaaacaacctcggcaacaggtaaacctgttttacgttgggtagacccgagttttgatcaaagcaaatatgacagcatcgtctggaacccaatcacttattatccggtaccgaaaccttctacccaggtagggcagaaagttctggataaaattttgaactataccaacaccgaaatgaaagaagcgatagcgcagcgtaaaccactggttaccaccgctgggccgcgtagtctgattttccgtggggccattaccggtgtaggtaccagtaaagaagggctgcaattctatgaagtggttcctgttgcattagtggttgcggggacgcaaatggctacaggccaccgtaccatggatactcgcttgtattttgaaggtgagctgattgatgcagcgactaataaaccggttatcaaggtcgttcgtcagggcgaaggtaaagacctgaataacgaaagtacgccaatggctttcgaaaatattaaacaagttattgatgacatggcgaccgatgccaccatgtttgacgttaacaaaaagtagttccagacgcgccatcgttagatggcgctttttattatcggtttctgttagcgattaaattcaacaccacgtaacaaacgcctccggcaattaatccccaaaacgcagaaccaatcccgaacagcgtcaatccacttgccgttaccagaaatgccaccaccgccgcgtcgcgctcacgctcattatgcagcgcctgatacaaactgccgccaatggtactcaacagcgccagacctgccagcatctggatccaacttacgggcagggcagccatcatcccggtaatggcactaccaaacagacctgcgagcaaatagaaaatgcctgcaacggcagcggccagccaacgttgatctttatccggatgcgcttccgggctttggcaaatagccgcggtgattgccgcaataccgacggaataaacgccgaaaggggaaaaaaccagtgccagcaatccagtaaatacaattaatggcgaaacaggagccgaatatccggcggctttcattgctgcgatacccggtgcgttttgcgatgccatcgtcaccagaaaaagggggagtgcaacgctcaggctgtgagcaaacgaaaaatcagggctaatataagtggggagaacgggtttaaagacaacatcagttgtgacaacgtcaccttgcgcgataacgatcacgaccccaataatcatcgcggcaattaccgcatagcgcggcgcaacggccctggttgccagccataccagcaacatactgccacacaacgtaaattgaccatccaggctcgcaaacgcctgtaaaccaaagcgtaataaaatcccggcaagcattgccgccgcaagcgagtgcggaataatgcgcatcagacgagcaaagagtcccgttatgccgcagaggactattaacacgttggtgacaataaaaacgccgatggcttcgttaagtgttagtccctgtaatccggtgaccaacaaagccgcgccaggcgttgaccatgcggtgagaacaggtacgcgataccataatgtcagagtcagcgtactgacgcccattgccagccccagcgccgtcatccagccagagatttgtgcagtggtggctccggcgacaatcgctgcttgccagattattgccgctgaactggcgtagccaattaataccgccagaaaccccgccagtagcgtgggtggaggaatagaaaacagacgcatagtcacctcgtgcgttataacgtacaggtaccgtagcatttgtccgttataacgcacaagtgataaacttccgttttgccggaggagtcgcatggaaaatctcgctcgctttttatccaccacacttaaacaactacgtcagcagcgcggctggagtctttcgcgactggcagaagcgacgggcgtttctaaagcgatgttagggcagattgagcgtaatgaatccagcccgacggtcgcgacattatggaaaattgccaccgggttgaacgtgccattttcaacatttatttctccgccgcagtcctctacgccttcagtttatgatccacaacggcaggcgatggtgatcacttcgctgtttccttatgatccacaactctgctttgaacacttctcgattcagatggcacccggtgcaataagcgaatcgacgccccatgaaaagggggtaatcgaacatgtcgtcgtcattgatggacaacttgatctgtgtgttgatggtgaatggcagagccttaattgtggggaaggcgttcgatttgctgcagacgtcacgcatgtctatcgtaatggtggggagcaaaccgtacattttcattccctcatccattacccgcgcagttaagcgggaaaactatttcgcaacgtcgcgcttgtggctaaaatagccgccatttttcagctactggataagaaagtgaccgtatcttctcatcgtcttgaactgttaagcccggcacgcgatgccgccattgcccgcgaagctattttgcacggtgccgatgctgtttatatcggcggccctggttttggtgcccgtcataatgccagtaatagcctgaaagatattgccgagttggtgccgtttgcccatcgttatggtgcaaaaattttcgtcacgcttaacaccattttgcatgatgatgagctggaacccgcgcaacggctgattactgacctctaccagaccggtgtcgatgcgctgattgttcaggatatggggattctggaacttgatattccgccgattgaactgcacgccagtacgcagtgcgatattcgtacagtagaaaaagcgaagttcctctctgatgttggcttcacgcagattgtgctggcgcgagagctgaatcttgagcagatccgcgcgattcaccaggccacggacgcgaccattgaattctttattcatggcgcattgtgcgtggcctattcgggtcagtgctacatttctcatgcgcaaacagggcgtagcgccaaccgtggcgattgctcgcaggcgtgccgtttgccatacacattgaaagacgatcaggggcgggtggtttcctatgaaaaacatctgctgtcgatgaaagataacgatcagactgccaacctcggcgcgctgattgatgctggcgtacgctccttcaagattgaagggcgttacaaagatatgagctacgtgaagaatatcaccgcccattatcgtcagatgctggatgccattattgaagaacgtggcgatctggcgcgcgcttcatcaggtcgtactgaacatttctttgttccatcgacggaaaagactttccaccgtggtagcacagattattttgtgaatgcccgtaaaggcgatattggcgcgttcgattcgccgaaatttatcggcctgccggtgggcgaagtattgaaagtagcgaaagatcatattgatgttgccgttaccgagccactggcaaatggcgatggcctgaacgtgatgattaaacgtgaagtcgtcggttttcgtgccaatacggtagagaaaaccggagaaaatcagtaccgcgtctggcccaatgaaatgccagcagatttgcacaaaattcgcccgcatcacccactaaaccgaaatcttgatcataactggcagcaggcactgacaaaaacctccagcgaacgccgggtggcggtagacattgaactgggcggctggcaggaacaactgattctgaccctcaccagtgaagagggtgtcagcatcacacatacgctggacgggcagttcgacgaagccaataacgccgaaaaagcaatgaacaatctgaaggatggtctggcaaaactggggcaaaccatctattacgcccgcaatgtgcaaattaatttgccgggggcgctgtttgtaccaaacagtctgttaaaccagttccgccgtgaagccgccgatatgcttgatgctgcgcgtcttgtcagttaccagcgcggcagccgtaaaccggttgctgatcctgcgccggtttatccgcaaacgcatctgagtttcctcgcgaacgtatacaaccagaaagcgcgtgaattttatcatcgctatggtgtgcaactgattgacgcggcgtatgaggcacatgaagagaagggcgaagtcccggtgatgatcaccaagcattgtctgcgctttgccttcaatctgtgcccgaaacaggcgaaaggcaatatcaaaagctggaaggcgacgccaatgcaactggttaacggcgatgaagtattaacgctaaagtttgattgccgcccatgcgagatgcacgtcattggcaaaatcaaaaatcacatactgaaaatgccgttaccgggaagcgtagtggcatccgtaagtccggatgatctgctgaaaacattgccgaagcgaaaagggtaaaacgccagttttcgggttactcaccactcatcaaatctgcatgatattgcctgccgggtaaggtgtcacgccgcatccggcaacacacgactcaacgctgtcccgcttctggtttgcgcgatttttgccagtaaaaatgctcgcgcaaaccttccgccgactcttccgccacagcacgcaattcatcgctgtccgcttcatgacgcaactgatgatccacattctttacccacataaattcatgtcctttgtgccctgccatgagttgtcctgagaacagtgcacacgttaataagacaaccgataacgccttcgaaaacatcccgccacctttttctaaccttttgccgctatgatgccgatcgtttcttgaggttattattcagttttgcaaattagagcaaagaaattctggaatcttccttcctgattttgcattgcattctgccgttgcggcgatttagtgctattttcgagcacattacacacggaggtaaacttcgccattaaatagtcacgatcactttattgaagtgcctttgagcgtcgcctctaaggtattgctgttaaatgcttttttacagtcagaaatcactcagcaagagttagcccggcgaattggcaaacataaacaggagattactcgcctatttaatttgcaccatgcgacaaaaatcgacgccgtccagctcgcggctaatgcgcttggcaaagagttatcgctggtgatggtttgattacagttaatgaaaagttgtcatttttaacaactgatatagactgccgaatcatctgcacataattacgattcgataatgaaaaaataccagcagcttgcagaacaattacgcgagcagattgcgtcgggtatctggcaacccggcgatcgtttgccttcgttgcgtgaccaggtggcgctttctggcatgagctttatgactgtcagccatgcctatcagttgctcgaaagtcagggatatattatcgcgcgaccgcaatcgggttattacgttgcgccacaggcaataaaaatgccgaaagcgacagtcattccagtcacacgagatgaagcagtcgatatcaacacctatatttttgatatgttgcaggccagtcgcgatccgtcggtagttccgtttgcctcggcctttcccgacccgcgacttttccccctccaacaactaaaccgctcgctggcgcaggtaagcaaaaccgccacggcgatgagcgtgattgaaaacttaccgccaggaaacgcagaactgcgtcaggctattgctcgtcgctatgccttacagggcatcaccatttctcctgatgaaattgtcattactgccggggcgttagaggcattaaacctcagtttgcaagtggtaactgaaccgggcgattgggtgatagtagagaatccttgtttctacggcgcgttgcaggcgctggagcggttacggctgaaggcgttatcggtggcgacggatgttaaagaagggatagatcttcaggcgctggaactggcgttgcaggagtatccggtgaaagcgtgctggctgatgactaatagccagaacccacttggatttaccttaacgccgcagaaaaaagtgcggctggtagcgttgctcaatcagtacaacgtaacgctgattgaagatgacgtttatagcgaactttattttggacgggaaaaaccgctgcctgcgaaagcgtgggatcgccacgatggtgttttgcattgctcttcgttttcgaaatgtctggtgcctggttttcgtattggttgggtcgccgccggaaaacatgcacgtaaaattcaacgcttgcagttgatgagtacgctttccaccagctcaccgatgcagcttgcgctggtggattacctttctactcgccgatacgatgctcatcttcgtcgcctgcgtcgccagcttgcggaacgtaaacaacgcgcctggcaggctttgctgcgttatctgcctgcggaagtcaaaattcatcacaatgacagcggttattttctctggctggagctccccgagccgttagatgcaggagaattaagcctggtggcactgacgcatcatatcagtattgcgccgggtaatatgttttctaccggtgaaaactggtcacgtttttttcgttttaataccgcgtggcagtggggagaacgtgaagaacaggcggtaaaacaattaggcaaacttattcaagaacggctgtaatagcgtttaatttaattcctctcaggttgggtaatatgaatttcgaatagcagtcatatatcctaactccttgtctatactccagaagataaccttacagacggcataatgcgcggtagctcacaacctgattaaattttctcagggccgaaggtgtgcctgcaagccgccgtctatggttaaacaaggagatatttttacggcacggcggctgaacaattaattacgacaggagtaagaccttatgagcaagacatttgcccgcagcagcctgtgtgcgctcagcatgacaataatgaccgctcacgccgccgaaccgcctaccaatttagagaatccggaagggcgactggatattatcgcctggccgggatacatcgaacgcggacaaactgataaacagtacgactgggtaacgcaattcgaaaaagagacaggctgcgcggtgaatgttaaaaccgccgcgacttccgatgaaatggtcagtctgatggccaaagggggttacgatctggttacggcatccggcgatgcctcgctgcgtttgattatgggcaaacgcgtgcagccgattaataccgccttgattcccaactggaaagcgctcgatccgcgcgtggttaaaggcgactggtttaacgttggcggcaaagtttacggcacaccttaccaatgggggccgaacctgctgatgtacaacactaaaaccttcccgacgccgccggatagctggcaagtggtttttgttgagcagaatctgccggacggcaagagcaataaaggccgggtacaggcttatgatggccctatctacattgcggatgccgcgttgttcgtcaaagccacgcagccacagttgggcatcagtgatccgtatcaactcaccgaagaacagtatcaggcggtgctgaaagtgctgcgcgatcaacataatttgatccatcgctactggcatgacactaccgtgcaaatgagcgatttcaaaaacgagggtgtggttgcttccagtgcatggccctatcaggccaacgccctgaaagccgaaggccagcctgtcgctaccgttttcccgaaggagggcgttaccggttgggctgacaccaccatgctacatagcgaagcgaaacatccggtttgcgcctacaaatggatgaactggtcattaaccccaaaagtgcagggcgatgtggcggcctggtttggctcgctaccagtagtgccgcaagggtgtaaagccagtccgttattaggcgagaaaggttgtgaaacaaacggttttaactatttcgataaaatcgccttctggaaaacgcctatagcagaagggggcaagtttgttccctacagtcgctggacgcaggattacattgccattatgggcggtcgctaacttcgctggggtgttttatgaagtacgcagtggagtttgacaacgtctcacggttgtacggtgacgtgcgcgcagtagatggcgtcagtattgcgataaaagatggtgagttcttctctatgctggggccgtccggctccggcaaaaccacttgcctgcgcctgattgctggattcgaacagctttccggcggggctatctctatttttggtacgcccgccagcaatctgccaccgtgggagcgggacgtgaatactgtcttccaggactacgcgctatttccgcatatgtcgattcttgacaacgtagcctacgggctgatggtcaaaggcgtgaataaaaagcagcggcatgcaatggcgcaagaggcgcttgagaaagtggcgttgggggttgtacagcaacgtaaaccgtcacaactttctggtggtcagcgccagcgagtcgccatcgccagagcactggtgaacgaaccgcgtgtgttgttgctggatgaaccgctcggcgcgctggatctcaaattgcgagagcaaatgcagcttgagctgaaaaagctgcaacagtctctcggtatcacttttatcttcgttacccacgatcagggcgaagcgttatcgatgtccgatcgggtggcggttttcaataatggacgcattgaacaggtcgattccccgcgtgatctctatatgcgcccgcgcacgccgtttgttgcgggattcgttgggacatcgaatgtttttgatggactgatggcagagaaactttgtggcatgacgggaagcttcgcactacgaccggaacatatccgcctcaacacccctggcgaagtgcaggctaatggcacgatccaggcggtgcaatatcagggcgcagcgacccgttttgaactgacactgagcggcggtgaaaaactgctggtgagtcaggccaatatgacaggcgaagaactgcctgccacgctcacgcccggacaacaggtgatggtttcctggtcgcgtgatgtgatggtggcgctggttgaggagaggtgaatggcgatgaacgtattgcaatcaccttcacgtccaggtctgggtaaggtgtccggtttcttctggcgtaatccggggctggggctgtttttgctgctgcttggcccgctaatgtggtttggcattgtctatttcggctcgctgctgacgctgttatggcagggcttttatacctttgacgatttcaccatgtcggtaacgccggaactgacgctggcgaatatccgtgcgctgtttaatccggcgaattacgacatcattgtccgcacgctgaccatggctgtggcagtcactatcgccagcgccattctggcttttccaatggcgtggtatatggcgcgctataccagcggaaaaatgaaagcgtttttttatattgcggtaatgttgccgatgtgggcgagctacattgttaaagcctatgcctggacgttattgctggcaaaagatggcgtggctcagtggtttttacaacatcttgggctggaaccactgctgactgcgttcctcacgctaccggcggtgggaggtaatacgctgtcaacttccgggctggggcgctttctggtgtttctctatatctggctgccgttcatgatcctgcccgtgcaggcggcgcttgagcgtttgccgccgtcattgttgcaggcgtcggctgatcttggcgcacgtccacgacaaacctttcgctatgtggtgttgccgctggcaatcccgggtattgccgctggctctatctttaccttctcactcacgctgggcgattttattgtcccgcagctggttggccctccaggatattttatcggcaatatggtttattcccagcagggggcgattggcaatatgccgatggcggcggcattcaccctggtgccgattgttctcatcgcactttacctggcgttcgtgaaacgtctgggagcgttcgatgcactctgaacgcgcaccgtttttcctcaaactggcggcctggggcggcgtggttttcctacattttcccatcctgattatcgctgcctatgcgtttaacactgaagatgcggcgtttagttttccaccgcaaggcctgacgctgcgctggtttagcgtggcagcacagcgtagtgatattcttgatgccgtgacactgtcacttaaagtggcggcgctggcgacattaatcgcgctggtgttagggacgctggccgctgccgcgctgtggcgacgagactttttcggcaaaaacgccatttcgctgttactgttgctgcccattgcgctgccgggcattgtcactggtctggcgctattaaccgcctttaaaaccatcaatctggagccgggatttttcaccatcgtggtcggtcatgcgactttttgcgtagtggtggtgtttaacaatgtcatcgcccgttttcgccgcacctcgtggagtctggttgaggcgtcaatggatcttggggccaatggctggcaaaccttccgctacatagtgttgccgaatctcagttcggcgttactggctggaggaatgctggcgtttgccttgtcgttcgatgaaatcatcgtgacgactttttacggcaggtcatgaacgaacgttaccgttgtggttgctcaatcagcttgggcgaccgcgtgatgtaccggtaaccaacgtggtggcactgctggttatgttggtaacaaccttgccgatcctgggggcctggtggctaacccgcgaaggcgacaatggtcaataaccactgatacaggaatatgctatgcaacataagttactgattaacggagaactggttagcggcgaaggggaaaaacagcctgtctataatccggcaacgggggacgttttactggagattgccgaggcatccgcagagcaggtcaatgctgctgttcgcgcggcagatgcagcatttgccgaatgggggcaaaccacgccaaaagcgcgtgcggaatgcctgctgaaactggctgatgttatcgaagaaaatggtcaggtttttgccgaactggagtcccgtaattgtggcaaaccgctgcatagtgcgttcaatgatgaaattccggcgattgtcgatgtctttcgctttttcgccggtgcggcgcgctgcctgaatggtctggcggcaggtgaatatcttgaaggtcatacttcgatgatccgtcgcgatccgttgggggtcgtggcttctatcgcaccgtggaattatccgctgatgatggctgcgtggaaactggctccggcgctggcggcagggaactgcgtagtgcttaaaccatcagaaattaccccgctgaccgcgttgaagttggcagagctggcgaaagatatcttcccggctggcgtgattaacgtgctgtttggcagaggcaaaacggtgggagatccgctgaccggacatcccaaagtgcggatggtgtcgctgacgggttctatcgccactggggaacacatcatcagccataccgcgccgtccattaagcgtactcatatggaacttggtggcaaagcgccagtgattgtttttgatgatgcggatattgaagcagtggtcgaaggtgtacgtacttttggctattacaatgccggacaggattgtactgcggcttgtcggatctacgcgcaaaaaggcatttacgatacgctggtggaaaaactcggtgctgcggtggcaacgttaaaatcgggttcgccggatgacgagtctacggagcttggacctttaagctcgctggcgcatctcgaacgcgtcagcaaggcggtagaagaggcgaaagcgacagggcacatcaaagtgatcactggcggtgaaaagcgcaagggtaatggctattactatgcgccgacgctgctggctggcgcattacaggacgatgccatcgtgcaaaaagaggtatttggtccggtagtgagtgttacgctcttcgacaacgaagaacaggtggtgaactgggcgaatgacagtcagtacggacttgcatcttcggtatggacgaaggatgtgggcagggcgcatcgcgtcagcgcgcggctgcaatatggttgtacctgggtcaatacccatttcatgctggtaagtgaaatgccgcacggtgggcagaaactttctggttacggcaaggatatgtcactttatgggctggaggattacaccgtcgtccgccacgtcatggttaaacattaaggataatattgcagatcgtaagagtatgagatgatcttgcgtactgtcagagcactgatttctctgacagtacgtgctgcgtgcaaaatcacaacatcaaataaaccagccaaatctcatagagataagagtaaacaaaccaacagcagcaaagacatttatcagtactacagttctactggaaacattcatttttgccaccttttatcattgcccctatgtgtatagtacgggttaagaaaatccgcaataatactcattctgaagatagataagggcaagttgctgtttgatgattttttctctaactggtgaaaaaacttgatgcacgtcaaaagatgacgcatatttgcgcgcgttttattcatctggctggacgcccgtacatgtctctctatcaacatatgcttgttttttatgcggttatggcagcaatcgcatttcttatcacctggtttctttctcacgataagaaacgcatccgtttcttaagcgcctttctggtgggggcaacatggccgatgagtttcccggtggcgctgttgttttctctgttttaaatcttatgcactggcttgacggcaccacgcagacttatatcatttggatgaatcgataaatttcacaagtggctaaggagaaagtatgtcgcatctggatgaagtcatcgcgcgcgtggatgccgcgattgaagagagcgtcattgcccatatgaacgaattattaatcgccctgagcgatgacgcggagttaagtcgggaagatcgctacacccagcagcagcgtttgcgcaccgctattgctcatcacggtcgcaaacataaagaagatatggaagcgcgccacgaacagttaaccaaaggcggtaccatcctctgattaaaatgagcgtctggccaccagccaggcgccaaccacaagtaaaattgcgccacaaattgggccgatcaacgcccgaagtggtacgccatggctgcggaagatatccagcaccagaccgccaatcagctggctggcgaccagtactgcaatagttgtcgccgctcccacattctgatatccgctgatactggcgaagacaaaaaacgatcccagcaagccaggtataagtgtccaccagcgcacgctggacaccagttcgccaaaccccgccatgccttgtttaaaccataaaatagaaacaaagagcacaatccccaccagtgagttcagcaacatggcgatgagaatggtagaggaggtctgggtgatgcgcaccatcagcgtgttctggactaccagaccaatcccggctgcaatcaaaaaggcaagggtaagtgactgattcatccgatcgcgtccggttcagtgcgctcgtcgagttgcaactgcataaatgtcagatccagccagcgcccaaatttagtgcctacctgcggcatttgcgcggtgacgacaaatcccagcgactggtgcagatgcagcgaggcctgattttgcgattcgatcccggcgaccatgacatgcttcccgcaatcccgcgcttcatcaatcaatcggcttaacaatttacgccccagacctttcccctgatgatcgggatggacataaaccgaatgttccacggtatggcgaaaaccatcaaaactacgccagtcgccaaacgaggcatatcccgtcactacgccatcttcttcactcaccagcaccggataacctgctatggtccgcgcttcaaaccaggcaatgcggttatccgcatccaccgtttggtcattccagatagccgccgtatacaacacggcgtggttataaatttccgcaattgcagcacagtcggctttgcgggcaaaacggatggacatgtctggcctcgataaaataatgatgatgatgttatcaatactatcgaaaacagcccgaagcaacggattcctctatgaaattattgcgtgttgcagaggggatgtgacggctgcaaacaaaaccaatcctgtgagcctgctactattgatggattcatgccaaaagcacaggagagcattatggggcaacaaacgcagcgtaaccgatgttgggttctgtccttgcgtccgcatggcgcgccggttccttacgtctggtttcggtaaatgcgctctttgtcgcaccagcgcaagcatttacagttccggaagtgggaaaacgtcaattaaatgaaatcaatcggatccgctacgaactggaattaatggcagttgctctggctgtcgaaaacctcactatgcaaaaaaacgttgctttgttgtgccaacaatacagccgataaataaaatacgcccggcaaataccgggcttaaagataattactcaaatcgccacgcaatatttatgccgacaccataatttcgtccgggcgcaggttcgtaatatcgcccgtttgactcattgacaatgacagagccaacgtattctttatcgaataaattatcgacacgaccaaataaatccacggtaaaattgtggtaattgtatttatacccggtgaataagccgacgagtgtataagaaggcgctttggccgtattttcatcatctgccataatatcgcccatataacgcgcttccgtgcctgcataccaaccatcttccggtatataacctatcgacgcaaagcccatattacgggcgatccctggcatccggttaccgttacaatcctgttcattgcacacattgctgcgataggtcgcatcaagccaggtccaggacgcttttacgcgaaaatctcccgcgaaacgttgatcccatgccagttcagcgccttgacgacgggtctttccggcatttttgtaagtcgtacgcccaccgctactgctatcgacaacaatttcatcatcggtgtcggtctggaacaatgcgagactaagcagcccatcaccaatacgcgttttactgccgatctcaattgtatcgttggtggagggttttaacccaaagttcataccgctttgtccatcagcacgataagacagctcattaatcgtcggcgtttcaaaacctcgcccgtctgccagatagatattccaggcatcggtcattgcatattttaacgaaccggcaggtagccatttgtgataactggcatcaccgctgtcatcgccgttacccggagtaacgtaatggtcgttggaatcaaaccacacggagctgtagcgcacgccagcatccagcgacagtttttcgctcagctgccactgcgtctgtaaatagggatcgacgttccacatcagattgcgttcgtcgcggcgcaactcacctttttgcccgtattccggcacgccgctattcaggcggaagttattgtagcccttgcggttttcactcatgttttcgtagttcaggccggtagtgaacgtgagcggaacgcccagttcaccacggtgtgtccagcggctgtctatcccctgataatggcgttgcagagtaatcacgccgcccgcatgtgacgggttaagttggggagccatcgggattgactggtactgggtcgtttctcgctctccggcatacatcatcacactcatatcatcttgcgcgctcaggctacggctcatagcgcaacccagcctgagtttgcttgatggtttttcgcgtgtcgtactgttctgcacgaggcgcttgttgtggattcgccttccattctgctttggttagcccacctgggtcatctgctttgatatccacactattgaaaatcaggcttaatttgctggcgtcatcaatgcgtacgcccagtttggcattggctaaatttttctgtgcgccgctatggtcacgatagccgtgggtcgtaaaacgtgtggttgagacggtgtaatcgacatcgccgggttgtgtgccgtcgcccgttgcgcccgtagctttcagcccatagcgccagctgccaaaactgccgtagtaactactggcttcaatggttggtggctgttgtccggtctgggtggtgacattcattacaccgccagacgcgttgccatacagagcagagaaggggccacgcagcacttccacattttgcacactgcttaaatcgatgttagatgtttgcccttgtccgtcgggcatggtagcgggaataccgtccacatacaggcgaataccgcgaattccgtaagtggagcgggagccaaatccgcgaatcgacagctgtaaatcttgcgcatagttctgccggttttgtacctgtaaaccaggcactccggtcagtgattcagacaagttaatgcgcggtgttgccaggcgcatctcctcgccattcaccacgctcacggctgctggggtatccagttctgaaaccacctgcggtgcggcactgacaatcatggtctgttcatcagcggcaaaaacaacgggggaaaggacaagcagtgcgggcaaaacggtctgtcggacggaaaaaatcttcatgaaaaaagccaggttaagaatgggaaaacaccgtcatggtaatgaaattgtaaatttatggaaaactaaacggcacaatacgttaagtaattgagaaaattgtagtcgtaacggtaagaaatgctccacatttgagaaaataatgattaccattcccatttataacaagggcgtaacgatgattacgcttagcgaagcattgtgaagcagcaaaaatatcggttcatcaaagggagtcgtcatgcatttacgtcatctgttttcatcgcgcctgcgtggttcattactgttaggttcattgcttgttgcttcatcattcagtacgcaggccgcagaagaaatgctgcgtaaagcggtaggtaaaggtgcctacgaaatggcttatagccagcaagaaaacgcgctgtggcttgccacttcgcaaagccgcaaactggataaaggcggcgtggtttatcgtcttgatccggttactctggaagtgacgcaggcgatccataacgatctcaagccgtttggtgccaccatcaataacacgactcagacgttgtggtttggtaacaccgtaaatagtgcggtcacggcgatagatgccaaaacgggcgaagtgaaaggtcgtctggtgctggatgatcgtaagcgcacggaagaggtacgcccgttgcaaccacgtgagctggtagctgatgatgccacgaacaccgtttacatcagtggtattggtaaagagagcgtgatttgggtcgttgatggcgagaatatcaaactgaaaaccgccatccagaacaccggtaaaatgagtaccggtctggcgctggatagcaaaggcaaacgtctttacaccactaacgctgacggcgaattgattaccatcgacaccgccgacaataaaatcctcagccgtaaaaagctgctggatgacggcaaagagcacttctttatcaacatcagccttgataccaccaggcagcgtgcatttatcaccgattctaaagcggcagaagtgttagtggtcgatacccgtaatggcaatattctggcgaaggttgcggcaccggaatcactggctgtgctgtttaacccagcgcgtaatgaagcctacgtgacgcatcgtcaggcaggtaaagtcagtgtgattgacgcgaaaagctataaagtggtgaaaacgttcgatacgccgactcatccgaacagcctggcgctgtctgccgatggcaaaacgctgtatgtcagtgtgaaacaaaaatccactaaacagcaggaagctacccagccggacgatgtgattcgtattgcgctgtaatagatatggcgagggtgaaaacggaaagaattgcctgacttttatcacgccgcatccggcaccttcgtcagtagtctgaatttgcccggcacgtagccgggcaattttgcaattaactcgatgtttcaggcttaaacacaatttcctgtttttcttcatcttcctcgacgactggcgcagtgctgtgaatttcagcaacgcgtttgcgcacaccaaaccaacctataaccagcagaataccgataatcggcagcgccgcgatggtataagtcccgttcgggtaatcgaacgccatcagcaccaggacactcagtaaaaacagtaatgtcagccaggaagtgaagggcgcgccaggcagtttaaaactgacatccgctgctttgccttctttaattgctttacgcaggcgcatctggcaaacgatgataaacgcccatgaagcgatgattcccagcgacgcgaagttcaacacaatctcaaatacgcgtgacggcaccagatagttgaggaatacgccgacgacatacacaaccagtgtcgccagaatcccggcatacggcacatgctgacgactcattttcgccataaaactcggtgcggaaccgcccatcgccatcgagcgcagaatacgcccggtgcagtacagacctgaattcaggctggagagggcagcggtcagcaccacaatgttcataatgctgccgatgtacggcacacccagtttagataaaaacgtcacaaatggactttgccccgcctgatacgcgctccacggcaataacataaccagcaacaccacggagccgacgtaaaacagaccaatacgccaaatcacactgttaatcgctttaggcaccatggtctgcggatctttacattctccggccgctgtacccaccatttcaatggaggcaaaagcaaacactacgccctgaatcaacaccagcgcaggcagcaaaccatgggggaaaaagccgccattatcggtgattaaatgaaagccagtggtgttgccatccagcggctgaccactaccgaggaacactgtacccacgaccaaaaaggttacaatggcgagcactttaataagcgcaaaccagaactccatctccgcaaaccatttcacaccgatcatattcatggtgccaacgatggtcagtgcagcgagcgcaaagacccactgcggcacgccgccaaacgcgccccagtaatgcatatacagagcgacggcggtaatatcaacaatccccgtcatcgcccagttgatgaagtacatccagccagcaacataagcggccttctcacccaaaaactcacgggcataagagacaaaactgccactggaagggcggtgtaacaccagctcacccaatgcacgcagaataaaaaacgaaaacaggccgcagatcaaatagaccagtgccagtgcgggccccgccatttgcagtcgcgcccccgcgcctaaaaacaaacccgtaccaatcgcgccgccaatggcgatcatctgtacctggcgattgcccatcgctttgtgatacccctcttcgtgggcattaagccagcggcgtttcgcggcgtgctgatctgaagtgtcggtgtcgtgtttactcattgctctccctgattgctttaatgaaaaagtcatataagttgccatgaacaatgtttattcatcctggcgatgatagttatcaccattattctttatgggtataaaactatcggcgcagcatcctacccgttatcgataaacgatgcaaaacatccccttacaatcctgaaggggatttatacaactgacgaaaaaatgataaatccttttgctggataacctgtgtgctgtcctacacttaatctttaaaagattgtgaggggcatatgattaaggtgtatagcgtacccggctggggctctacaatcagtgagctgatgctaacactggctgatattccttatcagttcgttgatgtcagtggttttgaccacgagggaacttcacgcgatttattaaaaaccctgaatccgttgtgtcaggttccgacactggcgctgtaaaaataacgagattatgacggagacagcggcgattgcattgatggttctcgatcgtcgcccggaccttgcgccacctcttgggcgcgccgaacgtcaatagtttcaacggctattggtctggctggttgctaatgtctatccaacgttcactttcgccgattaccctaagcgttgggcatctgacgcacctgaacagttaaagaagagtgtaattgaatatcgcaaatcgctttatatctggctgaattcgcaattgactgctgaaccgtatgtgtttggagagcaactaacgctggtggactgttatctctgcaccatgcgcacatggggaccgggacacgaatggtttcaggataatgccccgaacattaatgcgattgttgatgctgtatgtcagataccgaaattacaagaagtattaaaaaggaatgtcattatttaacaataatgccggaggttaatgttaatgaatcactggcgtagttaactggatatccatttgtttgctatgaatagtaattaaagttggtacaactatttatatgattgatgtaatttcgttttttatatgaaatatcaatttaatataatccgaaaataaaacatcttttcgcatgtagagaaacatgtcgatatgatagtgcagtgcagatcatgtcatcagggtagggcggtagcgtatttaatcagggaaagattacgcaacgctgcttttttgtactgaacgattctcattttatgtttaaaaattgagatactccttatttcctgaagctgtttttcattgcttatacatgatcaaatactccttacataattaaggagaacaaaatgaaacttaatacacgccaacaatttgtattacttaaatagaccagtgaaggtacgcatcagaatatccggtgaagtgattaatatttcgttgaatatttctccggatttttgaaacctgctgctgtagaaattctgaacaggaggaattatgcctttagcagccaaacttaccgacaaaggcacccagcacgacggttattacgagaccgtcatcaccgccgggtcatccaccgtttttattgatggcctccccgcagctcgtcaggaggatccgctgacgccgcatgataaaccgaagcatccccctcatccccgtaaaatcgccagaggctcgtcaaccgtctttattgacggcctgcccgccgccagaaccggtgatgctattgactgcggcggcgtggttattggtggcggtacggtaaatataggctgatatgtctgagaggtatttatgtccttaaaaggtcttcgctttacgctggaggttgacggccaggagccggacacctttgcagtgttgagcttccggttaatccagaaccagtcttatccgtttgtgatgagtgtggatgtcgccagcgattcttttatgcagacggcggagatgctgctggagaagaaggcaacgctgaccatctggcagggcgtcatcccgcagcgttatgtcacaggcgtggtggcgggctttggcatgcaggagaacaatggctggcagatgcgttaccacctgtgtattgagccgccgttatggcggtgcgggctgcggcagaacttccgcatcttccagcagcaggatatccggacgatatcggccacgttactgaacgagaacggcgtcacggagtggacgccgctgttttatgaggaccatccggcgcgggagttctgtgtccagtacggggaaagcgacctggcgtttctggcgcggctgtgggcggaggagggtattttcttctttgagcggtttgcggcggacagtccggagcagaagctgacgctgtgcgacgatgtggcggggctgtcacaggcgggagagtttccgtttaacccggacgcatcgacaggagcggagacggagtgtgtcagtatgttccgttatgaggcgcatgtccgcccgtcgtcggtgcagagccaggattacacgtttaaggtgccggactggccggggatgtatgagcagcagggtgagagcctgaacggacagcttgaacagtatgaaatatttgattatccgggaaggttcaaggatgagcagcacggcaaggatttcacgctgtaccagatggagagcctgcgcagtgatgcggaaaaggccacagggcagagtaattcgccgaagctgtggccgggaacgcggtttacgctgacggggcatccgcagaagatgctgaaccgtgaatggcaggtggtacagagcattctgtcaggagaccagccgcaggcgcttcatggcagccaggggagaggaaccacgctgggaaatcagttagaggtgataccggcggaccggacctggcgtccacgggtgcagagcaaaccgaaggtggacgggccgcagagtgcgatagtgacggggccagcgggagaggagattttctgcgacgaacatggtcgggtacgggtgaagtttcactgggaccgttatcacgggatgacggaggagagttcgtgctgggtgagggtgtcacaggcgtgggcggggccggggttcggtaacctggcgataccgcgtgtgggtcaggaagtgatagtggacttcctgaacggggacccggaccagccgataatcatggggcggacgtaccatgaggacaaccgttcgccggggagtctgccggggacgaagacgcagatgacgatacggtcgaagacctataaaggaagcgggtttaacgagctgcgctttgaggacgccacggacaaggaagaaatctacctgcacgcccagaaaaatatgcaggtcgtggtgctgaacagcaaggataagcgggtcaactatgaccgggcggtcagcatcgggcatgatgaattcctggtggtggcaaatgaccggaaagtgacggttgaaggtaaacaggaccataaaaccaccaaagaccacgtcagcctgacagagggtaatcagggactggaggtgaaaggcgatctggcacagaaaataagcggcgcgctgggtatcagcgtacagggcgatattgttttacagagcgacagcaaaatcagtctgcgggtgggaggttcatttgtggtgatccattccggcggcgtggatattaagggcgcgaaaatcaatcttaacggcggaggcagtccgggagacgtgatcctgccgatgcgcccggtgatcctgaaagccgcagccgggagtggttcgatgtttgtggcgcattgcccgaaggaggataagtgatggaaacggcacccgtaaagtacgctattgtggatggtgctgtggaggaaggattgctggattttctgaacgaagtgaatcccccacactgctgtctgtatgcagaacccatacagccggatctggtcgcgcgtggccccctatctcgtggaagttgttccggaggttgaagcatggctgagagataaggcgtcgccatggggaatatatctgacttctgagtcatccatgcgtgagctacagcaacacttcagacgttatctgtgggttaggatccccgaacaggagaaacctgttctcatgcgattttatgatccccggaatatatgggtattagcggaagttcttaccccccgccagcttcttttttttatcaaccccgtcagacagctaagtacccgctatggtgaagaatatcgtgaggataatttttcttccgtccgtcccgcagaaactatgaatataagggcagaacggccatcacaactgatgctgagttacagacaatatagccaactggaacgaaaggcacgggataattatcttgatacattatctgtatttatcgaagaaaatgcagaaaaagaagggtgggatgattcatcaaaagctgaatcatcccgaattctggcagaagattatttctctttttgccagtcattaaatatagcagatgatcgttccgtcagaacaatgacgcttatcttactgaaaaaaaacataatcgatctccgatatattccggatgactggtatgaactactcagcaatcagtcatatccgggacatattcgggtacatgaacttgcacaacaggaactgggatttatcccgcaataaaaagacaaacggatagattatatgacatctccatcttcgacagccggaaagccttgtgtggaatgcggcatacctgatccatgtatttttgatgttattagtgattttccagaggccggcgagaaacatttctggtcaaaagaaggaatggcgcgttttaagctactggacgatggttttggatgtgatggtataattaaccattacctaccagtgcgacaacagtgggacacatgaggcatggttagaggaagaatcagaaaacagtcgtaagatactgcaaccttttggaaaacccaataatgttacattatattatgaaggtttcaagggtggaatgaatatcattgatgcgtttcattctccgtgggagtatctgagttcaattaccatgccacatgatgttctttatgaaccagcacattacacagtcagaattgatagctgttacgagcacaactcctatgtcgagattaaggtttatccttcattagaaattcggtttaccacagggcttagttatgagatttcgtcatcacaacagacacgagcggtaaaagatcgacgtgatgaacggagaaaagctcgggaggcgatggaagatacaaaacctaaagataaaaataaactacgaagcggatggacaaatacaaccgctgagtttgagttgtttcacaagacatctcttaccgttgaactgggattaaaagtcgctaatgttgaatatacacacaagtatgtagaggaaataaaaaaactcagacaaataaaacaactggagcagatgagtagaatagatgcgctgattaaaagcattaacaaatactttgcgccagatcctgacaacaaagatggtacgcgtaaatatgcgttattcagtgcaaaaatagaacctgtcacactggggatttcttatgcttatcaatacactgatattaaagatggtccgtgccatttttatggtctatatggtgctccatttttcaaagcatcattccgatttgatatcatctcatttatatgtgcatactgcaaaatggaagatctggtaaaccgatgccgtgaatatctccgcaagcatggaaccagtgttgaatgctatatcgaaatttcaccggaagttaatctcgatcttggggctgtatattctcaaaaagataaagcatgggaatttaacactaaagaaagcaatattaaacttggtttgaaaggtgaggttagtgcaacatttgagacgaatgtttttgtcgtgaaattgaaatctgaggttggtgcttctatagaagcaaaagctgggtttggatttgataaacgagatgatggaatggatcttgttctatttcatgatggagtgacgggcgcgtttaaagttaaggttgacatatctcgcggtgataaagatagaaaagagaatagtgagaaacccgaaaaagaaaatgaacttaagtggcaactatgtaaacctttggaagtagatgactcaccattacggattaatttgtatggtaaggaaaatactgtggaaaaaaaagtaacgccagtgacgcagtggcagataggcactgattattgaacggcgaagaatgaatcaaattaaagataataaggtaattatgaaaataaaaaatttaatatcagtcattttactatcaggaggtattatggggactggattgtactcgagcgataaccatcaaaaaatccgcagcaggtttaatatacaggaatcatattgtgccattaagactaatggtgtccttggattcagcaaccgaaaggatgtattgcgagaaaatggtgattcaaccggaaccaccagttccagcactaatgccatgatgctgatggaaaatggtgaaaatgaaatcagtctggagattggggcgttaaggtggttttctgataaacctgccagtaccgaagaacgagggcatttctcccaaaaagcagggtgcagtctggatttggttcgttttgttaagcaggaagaaaccatactttcttcgataaaggtgaccatcaaccagcagggaatacctgaagcgcagccagacagcatgcatcctgttatccgaaaagagattctggctgagcaggcagaacccggatttattgatccagactattttaatgaaacttatttcccgaaagggatgaaggtgtatcaatttacacaaaaggtctcggtggcggggcttcctgaatgggcctggacgcgagctacgccctttaccggaagcgatgaacagttacagaagctaaaagcagcctatatcgaaatggctgcaattattagcagcggggacagggcacgtctgaaagcttctcacaaagaggcactgaaagcctggtcagtcacaaccggtgacagtgaggatgaaatattgctctcgctctatccaaaagaagaaatagaaggcaggaaagccagaatgcagcccatcagatggggcgattacgctatccgggttatgaataatggacgtatggtgcagctatataataaatcgaaaccaacatattctccgctgacttatcgtttcatagatgaagatggtgatgaagttatggggtattacgctccggtattttcgctgattgatggtcagtttatccctgtcacttgattaacctgttgggctacaaatcaggatgtccggtaaggtgattattgctgagttaagcaccttaccatttttttaattttttgtcgctgatattccagacaggaaaacaatatgcctttagctgccagattaaacgacaaaggtacccagcatgatggctaccgtgagacagtcatcattgcggcttcatcgacggtatttattgatggattacctgccgcccgccagggagatccgctgacgccgcatgataaaccgaagcatccccctcatccccgaaaaatcgccagaggctcgtcaaccgtctttattgacggcctgcccgccgccagaaccggtgatgctattgactgcggcggcgtggttattggtggcggtacggtaaatataggctgatatgtctgagaggtatttatgtccttaaaaggtcttcgctttacgctggaggttgacggccaggagccggacacctttgcagtggtgaatttcaggttaatccagaaccagtcttatccgtttgtgatgagtgtggatgtcgccagcgattcttttatgcagacggcggagatgctgctggagaagaacgcaacgctgactatctggcagggcgtcattccgcagcgttatgtcaccggcgtggtggcggggtttggtatgcaggagaacaacggctggcagatgcgttatcacctgcgtattgagccgccgttatggcggtgcgggctgcggcggaacttccgtatcttccagcagcaggatatccggacgatatcggccatgctgctgaacgagaacggcgtcacagagtggacgccgctgttttatgaggaccatccggcgcgggagttctgtgtccagtacggggaaagcgacctggcgtttctggcgcggctgtgggcggaggaggggattttcttctttgagcggtttgcggcggacagtccggagcagaagctgacgctgtgcgacgatgtggcggggctgtcacaggcgggggagcttccgtttaacccggacacatcggcaggagcggagacggagtgtgtcagtatgttccgttatgaggcgcatgtccgcccgtcatcggtgcagagccaggattacacgtttaaggtgccggactggccggggatgtatgagcagcagggtgagagcctgaacggacagcttgaacagtatgaaatatttgattatccgggaaggtacaaggatgaacagcacggcaaggatttcacgctgtaccggatggagagcctgcgcagtgatgcggaaaaggccacagggcagagtaattcgccgaagctgtggccgggaacgcggtttacgctgacggggcatccgcagaagatgctgaaccgtgaatggcaggtggtacagagcattctgtcaggagaccagccgcaggcgcttcacggcagccaggggagaggaaccacgctgggcaatcagttagaggtgataccggcggaccggacgtggcgtccacggcagcaaagcaaaccgaaggtggacgggccacagagcgccattgtcaccggtcccgcaggagaggaaatcttctgcgacgaacatggtcgggtacgggtgaagtttcactgggaccgttatcacgggatgacggaggagagttcgtgctgggtgcgtgtgtcgcaggcgtgggcggggccgggatttggtaatctggcgataccgcgggtgggccaggaggtgattgttgattttctgaacggggacccggaccagccgctggtcatgggccggacgtaccatgaggacaaccgttcgccgggggacctgccgggaacgaagacgcagatgacgatacggtcgaagacctataaaggaagcggttttaatgagttgcgctttgaggatgcgacggataaggaacaggtctatatccacgcgcagaagaacatggacacggaggtacttaacgaccggacgacggatgtgaaacatgaccatacggagaccatcgggaacgaccagaagataacggtggtgaaggggcagacggttcaggtcgggaccagaaaagaagggggccacgaccagagtatcacggtggcgaatgaccggcgcataacggtacgcaacgaccagacgctgaaggtgacgaacgaccggacggtgagcgtgagtcatgatgacggcctgtacgtcagaaatgaccgtagggtgacggtgaaagggaagcaggagcataagacgacggggaaccatgtcagcctggtggagggaaagcacagcctggtggtgaagggggacctggcgaggaaggtgagtggcgcgctggggataaaggtggacggggaaatcgtgctggagagcagcagccggataagcctgaaagtgggtggttcgtttgtggtcatccattcagggggcgtggacatcgtcgggccgaaaatcaatctcaatagcggcggtagtccgggaacgccggtgccgacgctgcaaccgacggtgctgaagacaccggggggtgagaagagtggtgatggcagtgactccggagaagaaaatgaagaccctggagggagcggcttggccggaagtggtggtggtgatcgaggtgacgatgaggatgaacctgaaaaatatactctccagttccattttacagacgatgacgggataccgtattcagaaatacgctacattgccttctttgaggacggtgcgcagattcgcggtgaaacggacaaggacgggtatacagaagttttctctagaaccaatgatgcaaatgtagaaattaaactgttaactaatgattattatatatttgaggtgaattgtaatgagcaccagtaataacatgggtagaaccacacaggctcaaccaaagcccggtgtaaatgtctgcatagtaaaaaaagaaataactaataaattcaatgagattattaccaatgctttggctgaacaactagttgttttaaataaaagaaaaaaagacttatatagatgggaggagacagaaaaaaaagaatttcttgatatttttgggagaaatgagattgaggctaataaatggctgctgagaggcgttgaggcaatgatattagtcaatcagagagtgaaaagcaattgttttaaatatcaaggtgatgaatgtatttttgccaaagtgcagggagggattagtagtgagaatcctgttattgtaggccctaaattttttcatgccgcggttaaaggatacgattcccaggtatccactttatgtcatgagttttcacatttaagcgaagttctgtatactgacgatttaagccctccgggtaaaaatgcggaaacaacatctgctgaagaatacagagagcatgcggaaaatcttgtaaaagctaaaagtcgagatgtaatgataaatggatataacattgaacgttacttcgaataagattattcattgcctttatatcacaacctttacgctaatgtttttcagcacaaatttgaaaggtgaaaattatttaatacccaaaaaaaatgcttatggatcgttagtgttcgcagaaaagaagcatgaacatccgggtgtttatgatttatttcaatcaaacaaattcattacaaaagatacgacatactttgatctaactcctgattatgcaatgagtaaaaatgaaaatattatattgcaacaagaaaatcaagttttcttgactctttcagttgaaagtgtcaaaaaaaatattatagcgatagttaatgtttataatgctcatgatggctatttgtatatttataaaaagaatataccttataatggtaaggatttatgtgataaacgttttttaattacatcatatgatgtaattctcgattatctgggaggatggtgtaattatggactggatatgtcatcttctgcgtggcttgagataccacctaaaagcaattatacatatcaagttaatttaaatgactactacgtttttttaccaggcaagcatcgctataacgttggtacttttgagcatcttattgtaagaagtaattggttcaggaatgaaaatataaacacggcaatgtttaatattttaaaccaaagtcatcctaagaaaaaaattgatgatttattatataatcttgatctctatggggcaagactaggtgtctttttgagaagcaatgaagtttcgttattaatcgatggggatgaacttgactctctttatagcaagtaagcaaaaatacataatggtaagccatcgattgatacctggcggtagtttaggcgttaattattgggcggataaaggatgtagtttgtcacatgccagagaagttacacggcgaataaacccagcagcagatggcttcgatttagtacgttggccagcatttgagcattcttgatatgtattgaatgatgaaataacccccccacttaattacataaggattgtttaaaacaatggggtttagaaaaacaataatcacttcggtaggtttgatatttatttcattctcttttgtggcaaagtgctctcaactcaaaaatttgaataattactcagtgatgctttgtggaaaagtgtcaaataatatcctggatgatattggtggttataaagaaagaaatatattaatgctgcgagctataaaaaaaatcataataatgacaatcgtaaatattatatttttctattcctttcaatcgactgcggatgaaatggttttaataaaaaaatacgggtttgggcttgagagagatatcaaaggaaggccattaatttatcctatcgaaaattatgatgagtgtaagaaaaaatgcaatcatatgaattatatagcggatgtcaatgctcaattagctatgagtaaaaaaaataacaggatttttgctaacataacctttactaacaatagctctaccacgtattttttttctaaatattatctacctatgaaagtaaaagatggaaaaggagatgaatatgatgcgatatgcaaaaaaccattcagaatcaactctgggaatatcacgttggactacttaggtggttcatgtccttttgaaattaatacgaatcctgaacggtggaatactattaaaccaggtcgtagttttttgttgagtataaccttaaatgatatgtatgcctttataccaggagataattattattttataaaatcatctggctataaatttgttaatgacaagtggtttacactcaaatcaatcaataatatttttctttattttttaaatttaaaaattaattgtgctgatgatttttttgatattaataattttactacatgtaataatttgttattggatgaaaaaaacacttttttattaatcagttatgggcaattgaggatgaaaaaaattctatttacgtcacccctgatgaaatttctataagtatagacggcgataacttaaagttgccatattaggaatatgggaaagaacacggtgcgccgcttttttgcactaaataatttacattttatgttcaataattgatactaacatgttggatattaaaggtgaaattatcacaactgatgcgatgggttgccagaaagatattgcagagaagatacaaaaacagggaggtaattatttatttgctgtaaaaggacataaggagcggattaataaagcctttgagtgaaacttccgctgaaaattcaggttaaccgcgttccatgcaaacaattttcaaatattcatcaataaataaggagttccatgtttatacgaccagtcaaaccttcagatgttgaaccattaatggatatgctgcttgacagggatcaatttgatcaagatggccttcatcatgtacaaaaaacactaacacattatttctcaggtcaatctgccgatttatggtttagtgcagaacacttgggactggcagggattgcctactgtgcttctgaaatgatgacaaatgatgtctgaaatttattaatgctctggatcagtccttcccatcagcgccagggagtgagacatctgctgattaacgaaatagaaaagagctcacaattaaacaggcaagactactattagtagagaccgccagccatatcgattttagtgccgcccgcgcattttatacaaaacagggctttatcaatgaggcgataatacgcaattactatgatgttggtgaggataaattaatcttcactaaaaatatgcaatcgtgagataaaatatgctttaactcatatggaaacattgcttaaacaacttggttgctgcatatgattctttagcccgccgtaactcgcttaccactggtaacaaacgtgccagcacctaaatgatgcaacgtattgagcttatcatcatcaaactgccagcggccttcgacaaatacccgtgcgtctgccgctgctgataccacttcgccaaatagcgtatcgtatttttcttgcgcggaagttgcaggtagcaggcgacactccatccacgccagacatttttcctcgaccagcggcaaaccaagcaccgggcctctcactaccggaatgccgtagcaattaaatttatcttcttcacgacccgacacacttcccaccgcccacgtccagttagtcgccgcaacgcccgggataacgatgccaaacttaccgttacgttcaatcaactccctggtccatgtcgatttatctaccacaatcgccacgcgtggcggttcaaactctacgggcatcgaccaggctgctgccataatgttacgccgctgggattgctcatcgaaactggtgatcatgacagttgggccatgatttaacagacggctggcatggtgtaattcgacgggaatgaattggctcacgatatcgcctcgctatgaagggtgttttaaaagcgtagctcgtaacgcaataagtaacgaaattaacgggattggcgatttgcgaacgtgatgcatgtccgcgatcgcacaaaatagccagtgcggcgtctattccaggttataagttgagaaaaccactaagggaaacgcctgatgacgcccattctgaatcattattttgcccgtattaactggttgggagctgctgcggccaatattgatacgctgcgtgcattgcacctgaaacacaattgcaccattccgtttgaaaatctcgacgttttgctgccgagggaaatacagcttgatgatcaatcgctggaagataaactggtgatagcccgtcgtggcggttactgttttgagcagaatggcgtgtttgagcgggtgttacgcgagctggggtttaacgttcgcagcttgttaggtcgcgtagtgttatcaaatccgccagcattaccgccgcgcacccatcgtttgctgttggtggaactggaaggggaaaaatggattgctgatgtcggtttcggtgggcagacgctaaccgcgccgattcgtttaatgccggatatcatgcaaaccacgccacacggagagtatcggttgttgcaagagggtgatgattgggtattgcagtttaatcatcatcagcactggcagtcgatgtaccgttttgatctctgcgagcagcaacaaagcgattatgtgatgggcaatttctggtcggcgcactggccgcagtcgcattttcgccatcatttgctgatgtgtcgccatttgccggacggtggcaagctaacgctgaccaattttcattttacccattatgaaaatgggcacgcagttgagcagcgaaatctaccagatgtggcgtcgttatatgccgtgatgcaggaacagtttggtctgggcgtagatgatgcgaaacatggctttactgtggatgagttagcgctggtgatggcggcgtttgatacgcacccggaggcgggaaaataatttatgtcaggttgccggatgtggcgtaaacgccttatccggcctacattagtccggttgtaggcctgatcagcgaagcgcatcaggcaacggcatcaaaaatcaatggcccattcagcatggaatagaatcaccgccgtgccggaaatggtaactttctccggttggttatctcgaattgtcaccgtcacatcaattacaccatcacgccccaatgcgcgcccctgatggcctttaacacgcaacacgttgccatcgtgggataatacgttgtgatgtactaaccatgcgcccatcggaccattggcattcccggtcaccggatcttccacaataccaatcgcaggcgagaacatgcgaccgtcggtttcgcttttgcctgggcggatctggaacgggaagaaaccattgcagccaatctgcttgctgattgcggtcagcgcagcaaggtcaggcgaaagggcgtcgatatccacttccgacttcagtggaatcatcacttttgagtgtcctgttgttgccacctgaattggcaagcctggcagaatatcgtcctcagtgagatgaagcgcgttgataatcgctgcacgtgtttcaccttccagcggtggctcaaagcccggcgtaccttgttccagcgaaatacgataatcatcgttatgcttttcgatagtcacgcggtgttttcctgccagcgacgtttgccagaccgtgcaatttcccaaacctaatacctttgcacgtacatagtgcgcagccaccgtcgcgtgaccgcaaattggcgcttcaaccgttggcgtaaagtagcggatgcgcacatcgctgtcgtcgctgtgcagcagaaaagcagtttccgaatgacctaactcgcgggcgataagctgcatttgcgcttcactgagattatcggcggggaaaacaacaccggcagaattgccgcgaaacggttgagaggtaaaagcatcgacgtggtaaacctgcggtttcattaatgttctcctgtggctggagaactatcatagcctgcaagtggccggagagcgaagggctatccggcccgcgtgagaattaacgccgcgaacgcacaatctgataccgacgagtaaagtactcaaacggcgcgctccagacatgcaccagtcgggtgaacgggaagagcaggaagatggtcattccaagcaccagatgaacgcggaatataaaggcgacaccatcaagatgcgtagatgcaccgccctggaaagtgacaatgctttgcgcccagcccaccagcttcatcatttcactgccgtccggatgttgtgctgaaaaaggaatggtggttaacccaagaatgcactgaattaacaaaatggcgaggatcaggatatccgcaccagaagacgtcaccctgatacgcggatttgttaaacgacgcaccagtagccccgcaccgccaatcagcgtcaataccccgcatattccgccgaggatcatcgccatctgctgttttaccgccaccggcagaaaccacgcgtacatccagtgcggtgttaacatgccgaacaggtgcccgaagaaaatccccaaaatgccgatatggaacagattcgaccatatcaccatcccacgtttatcgagcatctggctggaggcggcgcgccaggtatactgcccgtaatcgtagcgcagccagcttccaaggataaaaaccgtgccacacaagtacgggtagatatcataaaaaaagacgttcagatactgaatcatttcccacctcccgcactgatgtcgacatactgcggcgcgacatcctggctaaagcgtcgctgatattgattaagcggcgagctgtcacacgccgtggcgttatcttcaataaacttcacctgttcctcttcccacaccgcatccagcgcctggcgggtgtcatcgcgctcctcactgttcacctgttttgtgacactgtcacttgaaagtgtacttcctgccagttgcaacagggtgtcaaataacgcgtaccacggtgcctcgcgttgttttaagcgtccgccaagcagggcgaggatcggcgcaacgttgagcaagccttctttcgcctgatcgtccggcagtacgcttaagtactccagatacagtggtagataatcgggcagttctcgacaatccaactgcaggccgaccttttcatactccgccagcaggtccaccattgcctggccgcgatcgcgggactcggcatgaacatgttcgaacagcagcagcgatgtggtacgtccacggtcaaacacttcgcaccattcggcctgtttatccagcagcggcgcgttaagcaggttgcgggtaaaatccgtaagcatcggcgcgtcgcggcggatcaacgccagcgcgtcctccttacattcccacaacagctcgtccggatattccatcaacaggccgatcactttgaggatctgcattattcgccctccgctttgtcgcgcacttcggtgatgttgatggcatcgatacggctactgttgaacaggttgaatttgctgtccgagccatggcaaccgtcgccaaaggtaaaaccgcagccgttgcgttcagcaaaggcatcgcccgccatttcccgatgactggttggaatgacaaaacggtcttcatagttggcaatggcgaggtagcgatacatctcttcgacctgggcgacgctcaggcctacttcgtcaatggcgcgggtatcggtaacgccttccacggtttgtgaacgcatatagtggcgcatcgccatcatccgtttcagcgcccgcagtaccggaccggtatcgccggcactcaacatattggcgagatattgcaccggaatacgcaggctttcgatggcgggcagcacgccttcgcttttcggcaagccgcccgcatcagcgtaagactgaatcggtgacagtggaggaacgtaccagaccatcggcagggtgcggtattcagggtgcagcggtaacgccagtttccagtccatcgccattttgtagactggcgaacgctgggcagcttcaatcacgttttgtggaataccttgtttcagggcttcttcgatcactgagggatcgtgcggatcgaggaacacttcgcactggcgttcatagaggtcaacttcgcgctcggtgctcgccgcttcctcaatgcggtcggcgtcgtaaagcagcacgcccagataccggatgcgacccacgcaggtttcggagcacacggtgggttggcctgactcaattcgtgggtaacagaagatacatttttctgacttgccgcttttccagttgaagtagatttttttgtacggacaaccgctaatgcacaaacgccagccacggcatttatcctgatcgatcagcacaatgccgtcttcttcgcgtttgtagatagcgccgctggggcaggtcgctacacaactggggttaaggcagtgttcgcacaagcgcggcagatacatcatgaaggtgttttcaaactgcccgtacatctccttttgcatggcctcgaagttgcggtcgcgggctcgtttttcaaattcgccgcccagcagttcttcccagtttgggccccagatcactttgtccatccgtttgccgtcaatcagtgaacgcggacgggctgtgggaatatgtttgccttccggcgcgctatgcaaatgttcgtagtcgaaggtgaaaggttcgtagtaatcgtcaatctgcggcactaccgggttggcgaaaattttggttattacgcccatcttgctgcccagacgcgggcgtatcttgccattcacatcacgcacccagccaccttgccactcatcctgatcttcccagtttttcggataaccaatgcccggtttggtttcgacgttgttaaaccatgcgtactccatgccttcgcgtccggtccagacgtttttacaggtcaccgaacaggtatggcagccgatacatttatcgaggttaagcaccatgccgacttgcgaacgtattttcattttttcgcctcctgaacctgatcgcgaccttcatcatccagccagttaacgttcttcattttgcggatcataatgaattcgtcgcggttcgagccgacagtgccgtagtagttaaagccccaggccagctgcgcgtaaccgccaatcatatgcgttggtttcgggcaaacgcgggtaaccgagttatgaatgccgccgcgcatgccagttacttccgaaccaggaatattcataatgcgttcctgggcgtgatacatcatggtcatgcccggcggtacacgttggctgaccaccgcgcgggcagtcagcgcgccgttggcgttaaatacttccacccagtcgttatcgacaatggtcagttctcgggcatcggtttcgctgatccagacaatcggtccaccgcgagagagcgtcagcattagcaggttttcactgtaggttgagtgaatgccccatttctggtgcggcgtcaggaagttaagggctttttccgggaagccgtttggcggtatctggcgcatttcactgacgctacgggtgtcgataggcgggcgataagccaccagactttcaccaaaagcacgcatccacggatgatcctgatagagttgctggcgtcccgacagcgtgcgccacggaattaactcatgaacgttggtgtatcccgcgttataggagaagtgatcgctttccagaccagaccaggtggggctggagataattttacgtggctgtgcctgaatatcgcgaaagcgaatcttctcgtcctctttgtgcagcgccagatgggtatgttcgcgtccggtgatctcgcccagcgcttgccacgctttgactgcaacatggccgttggtttccggtgccagtgccagaatcacttctgatgcgtcaatggcggtgtcaatcagcggacgcccctgtgccgggccatcacgcttggtgtaattaagtttaccgaggaaatcgatttcatcctgggtattccacgaaatccctttaccgccgttgccaagtttgtccatcaatggcccgagcgaggtaaagcgttcataggtagcagggtagtcgcgctccaccgccacaatattcggcgcggttttgcctggaatcagatcgcattcgcctttgcgccagtcgagcacttcacacggctgtgaaagctctgccggggagtcatgcagcagtggttgtaataccacgtcggtttctttgccgagatgccccacgcacacttgcgaaaaggctttagcgatacctttgtagatttcccagtcgctgcgtgattcccacgccggatcgaccaccgcagaaagcggatgaataaacggatgcatatccgaggtattcatatcgtctttttcgtaccaggtggcggtgggcagaacgatatcggagaacaggcaggtactggacatgcggaagtcgagcgtcaccagcaggtcgagcttgccttcaatcgccgcagtttgccactcgacttcttctggtttgatcccgtcgctggcaccgagttcctcgccctgaatcccgctttcggtccccagcagatacttctgcatatactcgtggcctttgccggaggagccaagcaggttagaacgccagacaaacaaattacgcggatgattgctgccgctatctggttgttcgcaggccatacgtaaatcgcccgatttcagcgcctgggcggtaaattctgtgggggataatccggccttgtcggcttcagctttcagggagagcgggttacgccccagctgcggcgcagaagggagccagcccatacgttcggcgcgaacgttgaaatcaatcaggtgaccgctgtatttactggcatcggcgagcggtgagagcaattcctgcgcggtgactttttcatagcgccactggctggagtgattgtagaaaaacgaggtgctgttcatctggcgcggtggccggttccagtcgagcgcaaaggccagaggcagccagccggtttgcgggcgcagtttttcctgaccgacatagtgcgcccagccgccaccgctttgtccgacacaaccgcagaagatcagcatattgatcatcccgcggtagttcatgtccatgtgataccagtggttaacacctgcgccgagaataatcatcgagcgcccatgcgttttatgggcggtatcggcaaattcacgggcgatggtttcaatatactggcgcggaacgccggtaatttgctcgccccaggcaggggtataaggtttgatttcagcgtaatctttcgcgctgttttcatcttccagcccgcgatcgaggccataattcgccagtaccaaatcataaacgctgacgaccggacaggtgttgccatcggctaatgtcaggtttttaacgggcaattggcgcaccaggaccggattgtgttttacgcggcgaaaatgcggattttcaatgccgccaaagtaggggaaggccacgcctgcaacggcatcatgttgaccgagcagagttaacgacaattcggtttccgtaccggcggcaatggattccagattccatttgcctttttctccccagcgaaaaccaatcgaaccgttaggcaccaccagttcacctgcggtattaactgccacggttttccactgcggattattgctttcgcccagtccatccaccaggtcagatgcgcggaccatgcgcccgggaacgtagctgccgtcgtcgcgaggttccagcattaccagcataggcatgtcgctgtagcggcggcagtagttgataaaataatcgctgggattatcgagatgaaactcttttaaaatgacatggcccattgccattgccagggcactatcagtgccttgtttcggtgccagccactggtcgcacaatttggccacttcagagtagtcaggggtaatggcgatggttttagtgcctttgtagcgtacttcggtaaagaaatgggcgtccggcgtacgtgtctgcggtacgttagacccccaggcgatgatgtaactggagttataccagtcggcagattccggtacgtcggtttgctcgccccaggtcatcggcgaggcgggcggcaggtcgcaataccagtcgtagaagcttaaacaggtgccacctaacagcgacagataacgtgttccggcggcgtaagaaaccatcgacatcgccgggatcggcgagaaaccggcaacgcgatccgggccgtaagttttgatggtccagacgttagcagcggcaatcagctggtttagctcctgccagttggagcggataaagccgccgcgtccacgtacttgtttgtagctcaggcacttttgcggatcgttcataatcgatgcccacgccagtaccggatcgctgtgttgcttgagggcttcgcgccacagttcaatcagtcgtttacgaatgagcgggtatttcaggcggttagcgctgtagagataccaggagtaacttgcgccacgcgggcagccgcgaggttcgtgatttggcaggtcagggtgagtgcgcgggtagtcggtctgttggatttcccaggtcaccagaccatttttaacgtagattttccagctacaggagcctgtacagttaacaccgtgggtggaacgcacgattttgtcgaactgccaacgctggcgatagctgtcctcccagtcgcggttgctatgcatcacctgtccgtgaccatcggcaaaggtttcgcccttttgtttgaagtagcgaaagcgatccaaaagtttactcatgacataactcctgctccaggaatgaattgggatctgatgccttgtcggatgagacacggttgtagcctgataagacgtgtcaggcatcgatctcttatttttggctgaacttccgccgaccataaatcagccaggtcagtagcacacaaacgatgtagaagattaaaaacactttcatcgcgcccaccggagagccggtcatattgagcgacatgccaaacgcctgcggaataaaaaagccgcccactgcgccaatggctgagataaagcccagagcggctgccgtttcggtgacggcttctctttgagcttgctcatcactaccgcctttcatcttcacccgataaattgttatctggcgaaagatgacggcgatcatctggaaagtagaaccacttcccagacccgcggtcagaaacagccccataaatacggcgtaaaatgcgatgaaattaccggagcctgtgcccggtaaggtaaggaacagcagggcgctgaaaatcgccataaaaatgaagttgatcaacgttacccgcacgccgccgaatttatcggaaatagcaccaccaaccgatcgcgcgatggcaccgataaatgggccaaagaacgccaggcgcagaatattcacatccgggaactgggtttttgccagcatggcaaaacccgcagaaaaaccgataaacgaaccgaaggtggcaagataaagcaggctcagcagccagagatgcaggcgttgtaagacagggagctggtcggcaattgaggcgcgtgaactggcgatatcattcatccctgaccaggcggcgatcgtggcaatcgccagtaatggtacccaaatccatgcggcattcgccagcgacatcaccgaaccgtcggcctgcggtacgccattgacgccgagaaaggcaaatacggggacaaaaatgaccagcggtgcaaccagctgcatcacacttacacctaagtttcctaatccgccattaatcccaagagcgctcccttgtttggcttttggaaagaagaaactgatattgcccatgctcgaagcaaagttcgcacctgcaaaaccgcatagcaaagcgataacgataaatatcccaaaaggagtattcggattctgcacggcaattccgagccagacgcaaggaataatcaggattgcagtactaaaaaccgtccatcggcgtccaccgaatataggcaccataaaggagtagggaacacgcaataatgcgccagaaacggagggtaatgcggttaataaaaagagttgatcggtagtgaaattaaaaccgattttattgagattaacagtaactgcgctaaatagcatccagacacagaaggcaaaaagtaggcaactgactgatatccagaggtttcttcgtgcaatatgctttcctttattttcccagaaggccggattttctggtttccagtcgcgtaaaagataacgactatttttctcattttgcagtgccatattgttcctcacatgcacacattggtaatgaaaaaaagacaaaacaggaggtaaggcgcaatagccagttattagaattaaggatgaatcaggtgaagtgctgattagaagaatagataagaaagcgtaactgcgggggcagaatgtggattaaacagacagatatgtgttactaaatgtaactaaaatggctttctggtatttgaaatttattttttaatattgtcagaatttatctgattaactgccgggccgtagacccgacaattattttagccacgacgtgtcgccagccagcagagcagggaaccgccgcagaccattagcgcgccttgccagaacgagaacgacagcggggcgctgagtaacacggctgcaagtgctgaggaaaggacgggcgtaaaatacgaacctaccgccattatggtgacgttgccatgtaatataccgacattccatgcagcataagcaaatcctaaggtaaatgccgcagagatgagtttaatcatgacgggcgtgctaaataccatttctggttgtggcgtaagaaaatagtaaacccacagacttgctcccgttagcaggacaaaaacggtaattccgttaaatccacgtgcgtatttattcgttactgtgcagtaggctgcccagataaacgccccaatgaacgccaggaaataactcaatgggctggtggtgatattattaataatttgatcataatgtaacccattgtcaccgcctaacacccagcagacgccgaccagggctaataataatcctggtacaatcagccagttggttttctgaccattaaacagaatggcaaagagaattgtcaggctgggccatagatagttcaccatccccacttcaatcgcctgatgacgggtcgccgcataccctaaggaaagcgccagacagatttcatagctgacgaataacagactcccggcgagtaaatagcctttcgggatctgccgaatacgcggaaatccaaccgtgaagattaacagcagcccgcttaatgaatagatagcagctgcgccgccgaccgggccgagtccctcactgacaccgcgaatcaatcctaccatcgtgctccacaggacgatcgctattagccctatgagcgttgctttttgtcgtgtcatgctcgctgttttgtctctcttgccgttaaaaattaagctgaattttatagcattttttttaactggcctgtcaggcagtggtgcgtttttctaccgctattgaggtaggtcaatttgcgcaggcggattattttgtggcaaacacgtgttctttttgatttcgcgcaaaaagattcagaattttactgttagtttcctcgcgcagtaatacccctgaaaaaagaggaaagcaatggacgtcagtcgcagacaattttttaaaatctgcgcgggcggtatggcgggaacaacagtagcagcattgggctttgccccgaagcaagcactggctcaggcgcgaaactacaaattattacgcgcgaaagagatccgtaacacctgcacatactgttccgtaggttgcgggctattgatgtatagcctgggtgatggcgcgaaaaacgccagagaagcgatttatcacattgaaggtgacccggatcatccggtaagccgtggtgcgctgtgcccgaaaggggccggtttgctggattacgtcaacagcgaaaaccgtctgcgctacccggaatatcgtgcgccaggttctgacaaatggcagcgcattagctgggaagaagcattctcccgtattgcgaagctgatgaaagccgaccgtgacgctaactttattgaaaagaacgagcagggcgtaacggtaaaccgttggctttctaccggtatgctgtgtgcttccggtgccagcaacgaaaccgggatgctgactcaaaaatttgcccgctccctcgggatgctggcggtagacaaccaggcgcgcgtctgacacggaccaacggtagcaagtcttgctccaacatttggtcgcggtgcgatgaccaaccactgggtggatatcaaaaacgctaacgtcgtaatggtgatgggcggtaacgctgctgaagcgcatcccgtcggtttccgctgggcgatggaagcgaaaaacaacaacgatgcaaccttgatcgttgtcgatccccgttttacgcgtaccgcttctgtggcggatatttacgcacctattcgttccggtacggacattacgttcctgtctggcgttttgcgctacctgatcgaaaacaacaaaatcaacgccgaatacgttaagcattacaccaacgccagcctgttggtgcgtgatgattttgctttcgaagacggtctgttcagcggctacgacgctgaaaaacgtcaatacgataagtcgtcctggaactatcagttcgatgaaaacggctatgcgaaacgcgatgacacgctgactcatccgcgctgtgtatggaatctgctgaaagcgcacgtttcccgctacacgccggacgtagtagaaaacatttgcggtacgccaaaagccgacttcctgaaagtgtgtgaagtgctggcctccaccagcgcaccggatcgcacaaccaccttcctgtacgcgctgggctggacgcagcacaccgtgggtgcgcagaacatccgtacgatggcgatgatccagttgctgctcggtaacatgggtatggccggtggcggcgtgaacgcattgcgtggtcactccaacattcagggcctgactgacttaggcctgctctctaccagcctgccaggttatctgacgctgccgtcagaaaaacaggttgatttgcagtcgtatctggaagcgaacacgccgaaagcgacgctggctgatcaggtgaactactggagcaactatccgaagtttttcgttagcctgatgaaatctttctacggcgatgccgcgcagaaagagaacaactggggctacgactggctgccgaagtgggaccagacctacgacgtcatcaagtatttcaacatgatggatgaaggtaaagtcaccggttatttctgccagggctttaacccggttgcgtccttcccggacaaaaacaaagtggtgagctgcctgagcaagctgaagtacatggtggttatcgatccgctggtgactgaaacctctaccttctggcagaaccacggcgagtcgaacgatgtcgatccggcatctattcagactgaagtattccgtctgccttcgacctgctttgctgaagaagatggttctatcgctaactccggtcgctggttgcagtggcactggaaaggtcaggacgcgccgggcgaagcacgtaacgacggcgaaattctggcgggtatctaccatcatctgcgcgagctgtaccaggccgagggtggtaaaggcgtagaaccgctgataaagatgagctggaactacaagcagccgcacgaaccgcaatctgacgaagtagctaaagagaacaacggctacgcgctggaagatctctatgatgccaatggcgtgctgattgcgaagaaaggtcagttgctgagtagctttgcgcatctgcgtgatgacggtacaaccgcatcgtcttgctggatctacaccggtagctggacagagcagggcaaccagatggctaaccgcgataactccgacccatctggtctggggaatacgctgggatgggcctgggcgtggccgctcaaccgtcgcgtactctacaaccgtgcttcggcggatatcaacggtaaaccgtgggatccgaaacggatgctgatccagtggaacggcagcaagtggacgggtaacgatattccggacttcggcaatgccgcgccaggtacaccaaccggaccgtttatcatgcagccggaagggatgggacgcctgtttgccatcaacaaaatggcggaaggtccgttcccggaacactacgagccaattgaaacgccgctgggcactaacccgttgcatccgaacgtggtgtctaacccggttgttcgtctgtatgaacaagacgcactgcggatgggtaaaaaagagcagttcccgtatgtgggtacgacctatcgtctgacggagcacttccacacctggaccaagcacgcattgctcaacgcaattgctcagccggaacagtttgtggaaatcagcgaaacgctggcggcggcgaaaggcattaataatggcgatcgtgtcactgtctcaagcaagcgtggctttatccgcgcggtggcggtggtaacgcgccgtctgaaaccgctgaatgtaaacggtcagcaggttgaaacggtgggtattccaatccactggggctttgagggtgtcgcgcgtaaaggttatatcgctaacactctgacgccgaatgtcggtgatgcaaactcgcaaacgccggaatataaagcgttcttagtcaacatcgagaaggcgtaagggggcgaacagatggctatggaaacgcaggacattatcaaaaggtccgcaactaactccatcacgccgccttctcaggtgcgtgattacaaagcagaagtagcgaaacttatcgacgtttccacctgtatcggctgtaaagcctgtcaggtggcgtgttcggagtggaacgacatccgtgatgaagtggggcactgcgtcggggtttacgataaccccgccgatctgagcgccaagtcctggacggtgatgcgctttagcgaaaccgaacagaacggcaagctggagtggctgatccgtaaagacggctgtatgcactgtgaagatccgggctgcctgaaggcgtgcccgtctgctggtgcaatcattcagtacgctaacgggattgtcgatttccagtcggaaaattgcatcggctgtggttactgcattgccggttgtccgtttaatattccgcgcctcaacaaagaggataaccgggtatataaatgcaccctctgcgtcgatcgcgtcagcgtcggccaggaaccggcttgtgtgaaaacctgtccgaccggggctatccacttcggcaccaagaaggagatgctggagctggcggaacagcgcgtagcgaaactgaaagcgcgtggttacgaacatgctggcgtctacaacccggaaggggtcggtggtacgcacgttatgtacgtgctgcatcatgccgatcagccggagctgtatcatggtctgccgaaagatccgaagatcgatacctcggtaagcctgtggaaaggcgcgttgaaaccgctggcagcggctggctttattgccacttttgccgggttgattttccactacatcggtattggcccgaataaggaagtggacgatgacgaggagggaaatcatgagtaagtcgaaaatgattgtgcgcaccaaatttattgatcgcgcctgtcactggaccgtggtgatttgcttcttcctggtggcgctgtccgggatttcgttcttcttcccgacgctgcaatggctgacgcaaaccttcggtacgccgcagatggggcgcattttgcacccgttcttcggcattgcgattttcgtcgcgctgatgtttatgtttgtgcgttttgtgcatcacaacatcccggataagaaagatattccgtggctgttgaacattgtcgaagtattaaaaggcaatgagcacaaagtggcggatgtcggtaagtacaacgccgggcaaaagatgatgttctggtcaatcatgagcatgattttcgtgctgctggtgaccggagtgattatctggcgtccgtactttgcgcagtacttcccgatacaggttgtccgttatagcctgctgatccatgcggctgcgggtatcatcctgatccacgccatcctgatccatatgtatatggcattctgggtaaaaggatcgattaaagggatgatcgaagggaaggtgagccgtcgctgggcgaagaaacaccatccgcgctggtatcgtgaaatcgagaaggcagaagcgaaaaaagagagtgaagaagggatataatctcttttgagctttaagctgaaaatggcgctgtaaaaggcgccatttttttattgtagacaacgtgcactttgttcatgccggatgcggcgtgaacgccttatccggcctacaaaccgttcaaatccaggagattgcagcgaacgtgtaggcctgataggcgtagcgcatcgggcaatgttgcgtttgtcatcagtttcaaatggcgctttataaggtgccatttttttattgcgtaaccagacggcgcagtcgcgacacatccactgttttttctgcctctgccagactccaggcattttgcagattcagccacatttgcggcgaactgccgatcaccacagacagttttattgccatttctggcgtcaaagctgcttttccggtcagcaatcgacttgccgtagagggcgcaatttccattgctctggcaaactcgcgcaggctgacattaagttcgtccagtgattcctgaataatgtcccccgggcggggatgattggccattttcatcagtgatagtcctcgtaatccagtatgtatgcatcgccattgacgaattcaaatgtgattcgccagttacccgagacagatatcgcccaaattccatcgcgatcgccgcttaacggatgtagtcggtaaccgggcatatcgatatcagcaagacagcatgctgcatcaatcacagcgagtcggtggcgtaatcgtttgacttgcgtcggtataacgccggaggttttgccgagaagaaacaagtcacgcaatcccttgtgtctgaaattcattatcatctcttcatccttgttccctcgaaaggaacactatcactattgttccgtgcagcgcaacaaatttcgctacgttttcgcgaattgtgaggggaaagatgggggaggaaaagaagaagagtgaaattgcggaaagcgtctcgcaaaacaggctgcgacccgaacatggcagtcgcagcaaagacctcttagcgacggaaatcaatcaccatacggccacggattttgccttcttccatctcggtaaagatggtgttgatgtccgctaacggacgcagggcgactttcggcaccactttgccttcggcggcaaactggaaggcttcggttagatcctgacgcgtgccgaccagcgaaccgaccacttcaataccatccagcaccagccgtgggatgtccaggctcatagactccggcggcagaccgacagccacgacacgaccacctgcacggacagcatccaccgccgagttaaacgcagctttagctaccgctgtcaccaccgctgcgtgagcgccaccggctttctcctgcacaattctggcggcgtcttcggtgcgtgagttaatcgctaaatctgcacccatttcggttgccagttttaactgttcatcattgacatcaatggcgatcactttggcgttaaagacattcttcgcgtattgcagggcgaggttacccagaccgccaagaccgtagatagcaatccactgtcctggacgaatttttgacagcttaacggctttgtaggtagtgacccccgcacaggtaatgctgctggccgccgccgagtccagaccatctggcacttttaccgcgtaatcggcgaccacgatgcactcttccgccatcccgccatcaacgctgtatccggcattttttactgaacggcagagcgtttcgttaccactgttacagtattcgcaatgaccgcatccttcatagaaccacgccacgctggcacgatcgcctggttttaatgaagtaacaccagggccaacttctgccaccacaccaataccttcgtgtcccagaatcacgccggttttgtcaccaaaatcgccattcttaacatgaagatcggtatgacatacaccacaacactccattttcagcagggcttcgccatgtttcagtgagcgcagtgttttatccgtaacgtcaacatgatgatccttcgtaacaactgcagccttcatagttcctccttttcggatgatgttctgcatagcaggtgaggcaaatgagatttattcgccactacccagtatggatgagatctgaaaaagggagaggaaaattgcccggtagccttcactaccgggcgcaggcttagatggaggtacggcggtagtcgcggtattcggcgtgccagaaattatcatcaatggcctgttgcagagcttcggcagacgttttcaccgccacgccttgctgctgcgccattttgccaaccgcaaaggcaattgcgcgggagactttctgaatatctttcagttccggcagtaccagaccttcgccgttcaggaccagcggcgaatactgagcaagcatttcacttgccgacatcagcatctcatcggtgatacgtgacgcgccggaagcaataacacccagcccgatgcccgggaaaataaaggcgttgttgcactgggctatagggtagattttatctttccataccactggattaaacggactgccagtggcgaccagcgcgttaccttcagtccaggcgataatgtcctgcggtgtggcttccacgcgtgacgtcgggttagacagcggcatcacgatcggacgcggacagtgtttatgcatctcacggatgatctcttccgtaaacagcccggtctgtcctgagacgccaatcagaatatctggttttacattacgcaccacatccagcagtgacagcacatcgctgtcggtatcccagtcactgagattttcgcgcttctgcaccagtttggtctggaaaggcagcaggttcggcatcttgtcggtcagcaggccaaagcgatcgaccataaagactttctgccgcgccgcttcctcgcttaatccttcgcgctgggtctgggcgatgatcatttcggcaatgccgcatcccgctgaacctgcgccaaggaagacgatttttttctcgcttaactgaccacctgccgcgcggctggctgcgatcagtgtgccgactgttaccgccgcggtgccctgaatgtcatcgttaaaagaacaaatttcattgcgatagcggttaagtaacggcatcgcatttttttgtgcgaagtcttcaaactgcaacagtacgtccggccagcgttgtttcacagcctggataaattcatcaacaaattcatagtattcgtcgtcagtgatacgcggattacgccagcccatatacagcggatcgttaagcagctgttggttgttggtgccgacatccagcaccaccggaagggtataggccggactgatgccgccacaggcggtatagagcgacagtttaccgatcggaatgcccatcccgccgatgccctggtcaccaagccccagaatacgttcgccgtcagtcaccacaatcactttgatattatggtttggtacgttttgcagaatatcgtccatattgtggcggttctggtaagagataaacacaccgcgtgaacggcggtagatctcagaaaaacgctcacaggctgcgccgacggttggggtgtaaatgactggcatcatctcatcaagatgattgtttaccagacggtagaagagggtttcgttagtgtcctggatgttacgcaggtagatgtgtttgtcgatttcggttttgaatccctgatactggatccatgctcgttccgcttgttcttcgatggtttcgaccacttccggcagtaaccccagcaggttgaagttacggcgttcttccatgctgaaggcgctgcctttattcaacaacggaaattccagcaatacagggccagcgtaagggatataaagcgaacgctgtttttttgtttttggttccatgtcactcactcttttttgaatatccatccctgggggcttttatcgtctttgcattaccgccagggcgtcaagtaccaagtataaagcagataaaaacaaaaacaccattgcgcaggcaatggtgtttaatcgtcattgaggactgatggttatgaattacttttcagcggggcgttttctgccggtgggattatttaccacgctggatttgtcaccttcggtaactattttgcgctggttagaaattttatggtccagtccaagaatatgacgtgcctgacggttcgatttcattttaactcctcaatcctgttgctagttttaaggacaacatcgccgtagcgaagaaacacgtgctaaacccctaaattaggttgccgatcaagcatagcaccttaaagcgtagggtgctgaccactgaccacataattgatcgtttgctggtagatatcactgaggatgtcgttatcagaagcttccacccatttggtcagctccatgagaatgtcatcttcagtgacaacaccgtgctctgcccgaaggccttgctcaatggcattaaccagagcgggttctgctgttgaattttctgcctgataataagtaaacatagtgattctccgtgtctgtgtatttatggtgtctgctacggatcgcagatttataaagcacattcagcatggcaaatatttgccgcttcgttgttaagattagtcctggttgatgatttttatattttaactccatgatattgataggtattattattgtgacgagttgattgatattgatgcaatatctcttgagttatatatttccggttatctattgtggaaatttaatttaagtgcaggaattatattttcgccggattttattcggattatcctgcttatcctcgtgctgtttctcacgtagtctataatttcctttttaagcccacaggagagcaacaatgacaatccataagaaaggtcaggcacactgggaaggcgatatcaaacgcgggaagggaacagtatctactgagagcggcgtgctgaaccaacagccgtatggatttaacacgcgttttgaaggcgaaaaaggaaccaaccctgaagaactgattggcgcagcgcatgccgcatgtttctcaatggcgctttcattaatgctgggggaagcgggattcacgccaacatcgattgataccaccgccgatgtctcgctggataaagtggatgccggttttgcgattactaaaatcgcactgaagagcgaagttgcggtgccgggtattgatgcctccacctttgacgtcattatccagaaagcaaaagcaggatgcccggtttctcaggtactgaaagcggaaattacgctggattaccagttgaaatcgtaaagcgttgccggatgacgcctcaggcgcgtgaatgcctgaggcgtcagccaatcacatcaggctgagaagggattgttgtgacatggctatgcgttgtcgttgtccaactaaacgtagcggaaatcacagtatttaagtgacagtgtcacgttaaataaaaacccgcgagtgcgggcgagaggaatttatcagattttcagcggtaacacgctgctcatccagcctggaatttcttcggcgggcagggggcgggaaaagaaatatccctgaataacgccgacagtggatcttgtgtagcatctcaaattgctctttggtttcgatgccttccgccacgacggttaaattgaggctttgcccaatgctggtaatggcttcgagtaaggcaaggatgcgtttttcggtcagacaacgatcgacaaaacttttatcaattttgatttccgttaccggaagactgactaagcgggataatccggaaaagcctgtaccaaaatcatctaccgataaaccgatgcccatatcgcgcaggatctgaatgcgcttaaagatttcggtatcgtgttccatcatcatgctttccgtgatttccaccgtcagctggtggccgtcaataccccaggcgtgcattgcatcagatacctgattaggcagctgattactgcgaaagtgcagcgcagacaagttaacggataacgccgggatatgaatattctggctacgccattctgctaactgacggcaagcttccgcgatgacccagcgcccaatattttcgatttcaccaatctcttctgcgagaggaataaaccgtgaagggggcacatgaccatgcaggggatcgtaccagcgagcaagggcttcgatgccgtacagttcacccgtttctgcgaagatttgcggctgataaaccagtttaagttggttattgctaatcgcttcttttagcgctgcgcctaaaaccaaacgctcttttaccatttcgttcatcgccgggctgaagaactgccagccgttaccgccatttttgcgaataaaatccattgcattgtgagcagtggagagcaggtaatcgcggtttttaccctcgtcgtagctgatgccaatgctcaaggtgagcgggaatggtttatcgtcaatcattatcggcttgctgaccacattccgtagctcatcagcgatctgggtaatgttactgacatcgttttccaggctcacgaggacaaaagacgcaccttcaatacgacagagatactgatccggtttgagtttttcacagaaagcgattgaccacttccagcaatgcctgatcggcccacgcatagccaaggctatcaatcacatcctgaatatggtcaacaccgatgagatacaccaccggagagacggctttgtcgaccaggtcatcgaggtaattgtgcaggttattgcgatttggcaaaccggtcatcggatcaaattggatgagttgttcaatatgctgacggcttttttcctgttccagcgccagcgcggccatatgctggctgatatctgccacgcgttcgataaaggcgctggtttctgctcctgacgaggttttaatttgcaggatccccgcaggcgcgccatcgcgctgacgaatggtcgctgaccagctttgcgcattttgaacttctgcaccgtgcgaagatgacgcccagtgtatcggcatcccgttgcgcagcgcgaacagcgaaacatgcgattcgttgagaacacattcgatgttacgacaaatgatttcccccatttcatgaaatggggggctgctgcacatggcggcgagaatattgccttcaagctggcggatttgcctttcttcggtgatatccgagaatgtcattaccaggttctgcagatgcgcgagcacgtcataaaccgggctgatagaggctttaatccagattttttcaccggtgcgcgtcaacagcagaaattcgtcctgatcgcgggcggttttccatagcaactgttgtaaacgaatacggttatcagcagggaattctggaatgttcaggagtgtatcgggctgcataccgctggcttcgttaatgcagtaaccaaacatttcggtaaatgcgcgattgcactgcacaatatggcgttccggatcgaggacaatcaccggtcggtcgagatggtcaacggcaataatcaattgtcgggtctgttctttttgcgccatttctacgctggcatcccgtaccagcgccaggtaataaactttcccctcggcgctcactttcgatagcgcaaaacgggtccagattttactgccgtcttttttctccagctgcagctcccgactcatcccctcgacgcgcgctttaccaccttcacggttgtgacgaatgtattgaggatgcgcaggacgcaaatcccgcggaatcagcatatcaatgttattgccaatgacttcttcacgtttgtacccccagagcttctctgctgcggggttgaaaaacatcacttcatcattttcgttaattaacaccgcgcccatcatgttttgctcaagggcggggaaaaaaatgccatcggcggcattatccgcatcggttagcttcatgattacctctgcatcctggcgcatctaaagactggctttacagagttcaacacggtttctacctcgtcttttggcgatatacagagcttcatcagctatttgaatgaggcgctcatagtcaggatgaccattaaacatggcggcaccgatggaaagtgagagggcaatatcctcgccgtttgcggctttaaaataatgtcgacctttatggttaaaccgcaggccaaaatcaaccaaacacaacgtgcgagatcgactaactgcaccatattctcctgaaatatgaagatatactgaaaagaaataagcgacttaggacagtttcaatctacgctactgttcttcagaagagtatagcccatcgtaattatttttcggtgacagcgaatatcgtatgttttttcatattcatacatttttattagggggattatggctgtttaactaagtgtggttaattgcgtggttaatttgacgtatttaagcatgattgctagtgggatagttcaagagggtaacaagccagtgggtaaagcaccggcttgttacaaagtaagaatgggagtttaactgccccaacgactttgcagatagctgaccgcttgttgcgtctgcggtttattcagatagtcctcacggaacaagattgtgccgctaatttccggcaaagcatcgttaagatcgagctgctttttcagttccggtacgccgccgttaatcatccagtctggctctatctttgaaggttcacccactttatagaaggcgataccgatatacaggcgggtcctggtcggtttaacgacatccgcccaccattttgccaacacgtcataacgcgcggcactccgtgagaatggccagtaaatttggggagcaatgtaatccagcaacccttgttccacccatcgacgggtatcagcgtaggattcgtcataggctgccgcgcctcgggtatcggaaccgagcggatcgtgtgatcggttacgccacacgcctgccgggctaacgccaaattcgacttccggcttaatgcttttaatggtgtgcgataccttcgcaattaactgctgagtattgttgcgccgccagtctgcttttgacgcaaatgcgccgccgtatttgcggtacgtttcgttatcatttagccgtgaacctggtgactcagtatagaaatagtcatcaaactgcacgccatctactggatagcgggaaaccacttccgcgactattgatgtgatccagtcctgaacctcagggatgcccgggtcgaggacaaagcgatcgccggacgttctgatccagtcgcggtgttgcacatagacgctcgccggttgttgagacagagtgctattcagttccctgatagtaccgggcttcgtattaaccgatacgcgataggggttaaaccaggcgtgtactttcatcccacgcttgtgggcttcgtcgagcataaattgcagcggatcgtaacccggattttcaccaatcttaccggtcataagatcggaccacggcaaaattttcgatggccacagggcggtaccatccggcttgacctggaaaaagaccgtgtttatgccgagacgctgcagatgatccagtttgtcgatcatcgcctgttgttgtacacgtgcccggctggtggggttactaatgttaaccgaggaaaccggtggccagtcgaggcgagacaccgtggccagccagatgccacgcatcggttgtgacgattgttgcgtcgtggctggtggctttgaacccgctggtggtgtcaccatggactctggaggcgtgcttttacaactacacagtaaaagtgccagtgcaaccagtatcgctggtcttctaatcgctaatttctcgtttcgggagcagatatccatatgtgctggtttccggtaaacagatgtgcgctcattctcgtacttatcccggttaagtcaatacgacaacaagcacgaaaaagggagcgatgaattatcgctcccttgtcttataaccattcagacatggttagtgtttcttgtcattcatcacaatatagtgtggtgaacgtgcacgcgggtgcaggaagaagtgaccttttggtgcgttctgactgttgattggctccagagtgacgccggtattcgctttgcttttacgatcatgaacagcatagagaataaagggcagggcaagtaccaccaggaaactaacgaccagtaattcaacatacatatcggtagagtcaccctggatgttatccggcggcaggaaggaaacaataaacgccataattgaagtcagcagaccgacaatagccacgaccagcttcacccctttaccaccagggatattaaatgtgcgttttaagtcaggatgtttaagaaccaacacaatgtagccaataaacagcatgaaataagcacacagataaatcaccaccgtcagcgccagtgcgatcaggaaggacatgttgttaccgccaccggtattggtgaggatgatcaacgcgatagaagtaatcaccagctgcgaaatgaccagcgttaccggtacgccatttttgttcattttagcgaatgccgctggcagcaggtttttctgcgctgtgacatacatcccgcgagaaggaccaacaatccaggaggcgatttccgccagaacacccagcaacagcagtgcggagatcacgcgaaccgtccactcaatttccggtgccacatgtgacatcagaacggtaaaggtttgcattacccctgcggagaggttgatttcattacccggaatgaccatcgcaatagacaaaccgccaacagagcttaagcagattgccgccaccatcagcagtaacatagccagtggatagtcgcgcccggggttgctcatttcattgacgtgggttgcggaagcttcaacgcccatataactcaaaatgaaggcaacaaatacaaccagagtgcccactttagagaagtcagggaagaaggtcttcgaatccatttcgatagcaacgggggcaccggagtgcagataaatagccgctaatgcgatcaaaataaatgcaggtaacaggataccggcgaagaagccaactttagcaattcgcgccgtgtatttcgtgccaccaaactgcgttaatgccagcgcccaaagaatgatgagtgctgcaatagttttggtaatggggtcttcattcagcgctggccatttcaggatgtaggagagtgcccctaacacgaaatagagcatcggaataaaaccaatggcgatttgcagatagccaaatgagatcgctgcaaatccccatctcggccccagagtatttgatacccaggcgaagacgccaccttcttcccagccgtcgacggtagccatttccgcagcacaaagtcccacgggaataaaccataaaatcccgcctaatagcaggaagaagactaatgaaaagcccgatgttgcgaaggtagggtattcataaacagccattaccatcgatgccgttatggcaaaaaatccgagtaatgtgagctgcttagctttacctgtctgtactgatgtagccatattatccccctaaaacggtattcctgtcggaaccgcacctgttttgttctgaagcgtattcagaacaatattttccgttgctaatgccagtgaacagactttggaaattgtcccgaaacggcttcgtttcgggacaccgttaccgttaaacgttatcaggtgtgtttaaagctgttctgctgggcaataccctgcagtttcgggtggtcgctgagatatttcagggaggctttgtagtcttccagcaacagttcagcaaagtccatttcgaagccgcgacgacacataatgcgcatcaccacgatgtcagtggcttcaccgccgagagtgaaggccggaacctgccagccgcgcagacgcagacgttcagagaggtcatacagggtgtatcccggatcttcaccatctttcagtttgaagcaaaccgccgggatgccttcgtccgggcgacccgtacagatgaactcatacggccccagtttggcgatttcatccgccagataagcagcaacctggtaggaagcgttctgtacttttgtatagccttcacgaccgaggcgcaggaattcatagtactgtgcaatcacctgacccgccgggcgggagaagttgatggcgaaagtaccaatctgaccgccgaggtagtcaacgttgaacaccagttcctgcggcagcgcttcttcatcacgccagataacccagccgcagcccagcggagccagaccgaatttatggcctgaagcactgatcgatttcacacgcggcaggcggaagtcccagacgatatccggggcgacgaacggtgccaggaagccaccgctggcggcgtcgatgtgcatgtcgatgtcgataccggtgtcggcctggaatttatccagcgcatcgtgcagcggctgcgggaactcatagttaccggtgtaggtcacgccgaaagtcggcaccacgccgatggtgttttcgtcgcaggcttcaatcatgcgtttcgggtccataaacaactgaccggggcgcatagggatctcacgcaactccacatcccagtagcgggcgaatttatgccagcagatttgtaccggaccgcacaccaggttcggtttgttagtcggcttacctgcagcttccatacgcttgcgccaacgccatttcatcgccatcccgccgagcatacaggcctcggaagaaccaatggtgttggtgccaacggcctgaccatttttcggtgcaggcgcatgccacagatcggcaaccatgtttacgcaacgcagatcgattgctgcagattgcggatattcttctttgtcgatccagtttttgttaatggataaatccatcaacttatggacattatcgtcgtcccaggtctggcagaaagtggccaggttctgacgagcgttgccatcaagatataattcatcattgataatctggaatgcgacatcatcacgcatttcgtgcagcggaaaacgttttgattctgcgatagtggaaatagacttcgcaccaaaacgtgaatcgagtagttccgaccttaaatccgttacttgcttcttatccattttaaactccttaaaatgattggatcgcattaaaaaagtaggatttatcgataaagtaagcaagtgcaaaggactcggttttaaataacaaaatcctaatgttatttatcgcgagatattgcgtgaataatgtatttttattaaaaaacaacataatagagaattctgtgtggaggtaaggtgttttatgttgttattttatgtgttttctatcgtctcctgaattatcacgtaaaaatcagaccttataatatcattattagtacacggttatttactttgaacacatttataaaattattacataaaaatagcgaatattgataaaatccccgccaacgatgtgttgacggggctgtgattattttggcaataatactccggtataggtattcaccggatgagaaagatattgtttaacagcagtgttaacattctctaccgtcatttgtttcaacaattgctcctgctcagtccatgctgcaggatcgtcatattgaataagactatttacaatggtattcgctaattgttgaacgctacgctgttggatatcgaggctgcgctgaacgttttgctggtattcgttcagttcttgctcactaatccctttggccagacgcttaaccatcacttcattcgctaacgttaacagttcatcatgtcgttctggttgacaagtaaaagccagcaaatgactgatatctttggcctgaggatcaaccgagaggcgagaagaaacgctgtatgccccagatgcctgttcacgaatattaatgcgtagatcttttgccagtgcgacgttaaaagcatcgagcgccatacgcgtcgccagattaacaggagtccgggaattataacgcttccactgtgaaacctgtgccactggttcattttgttcttttacagtaaccgatgcgttgtccgtcgcgcgagttaatggtttacctgcggctaatggcgaattagagtgtttgatagatcctaagtaacgcgtaattaacgccacgagtttgtcttctgcgacattaccgacaatgacaaacgtgatatccgctggagatgaaaacaactggcgatcggcagccagtgcatctgcggcagtaaactgtgcaatctgattttcttgcggtaatttcgtgcggtcatcggcatagagcgtctcatacatctgctgggcgaatttctccgctggacgctggtcgagcgttttcaacgcctgaatttgagcattttgtagcgatgcccaaatattgtcgttaatcgtgctgtgggtgattcgctggttaatcaactggaaaccaggttcagggttattagtccgcgcgctaacggagagcaacgtattcatgccactgactttactgctcatggttaccgagttttccgcactccagcgtttcaggctggaagaggagagttcaccaacgccgcttccgcttactgctttattagccagcgcgataagtgatttttgctgcgcagggaaacttaaatcgcctttattagatacggcaataatttgtagcttttgctcttcacccgcggattttgccagaataaccctggcaccattggaaagtgttaatgatgtcagattctcagccagcgtttctttgctgctaatttccgcctgtgggtcagcgtctactgttaacgataaatttctgcctgggaagatgtaagccgccagctttttgttggcgtactctttttccagcgccaggatagccgcaggagacaatgcttttttggcggcaacttcattgtttaccatttgctcccaaaatgcgtcctggttctttcttaactgctgccatttttccgccagactttgcacggtaatttgctgccacagacgtttcgaaagttgatatgtctcttccggcgacaagaacggcgtattatttaatgagctggatgccaggcgactggtcagcatacgtaaatcacgctcagcttgctgatcaaccgcatttttcagccaggtaaggcgggtagatttaacatcatcgagttcttcagcagaaaaaccatgctgatcaatggttgccaactctgccattaatgcattcgcagcatcctgcatattatcgtctcgtgcatttacacggaaaaatagcgactgataatcgggtgcaattttgacgctgcgcgcagtgccgccagaaatagtcttcaactcgcccgactgtatgcgttcctgcagacgttggttgaacagctgaaccaacatgctccattcagcttgttcgataaagctttgctcatcgttcacttgtaccattggcaggcgataatagagtgcgatgccgttcacccggttttctttatcattgatgatattaaagcgcaggtggttttcggcttttgtcggccagacgcgattttcagctgctttgttagccggaagcttacttaaattatcctttatcagcgccagcgcttctttactgtcgatatcgccgaccacaataaaggtcatattatttggttgataccagcgttgataaaattggcgcaattgtgccggtgtgaccgtggcgacggtatccatcaggccgataggttcacggtctaaattacgggtatttgccagcaggaaagggcggcgcgcctgagaggtgcgccatttcgcatcctgatgggcacgccattcctcagtaattacgccgcgttcagcgtctacttcgagtttttcaaaggttgcggcattactccattcactgaagattgccatcacttgttgcagattttgtttctgcgtagtcggcaaactcacctgatacactgtttcgtcatagctggtataggcattaacatcgcgaccaaaacgcaggcccattgactcaaatgtttcgatgactttattacccggccatgtttttgtgccgttaaacatcatatgttctacaaaatgagccacgccgcgctcattgtcttcttcctgcaatgaaccggtatgaatttgcagccataaatttacctgatcctttggttgagcatgcggataaatcatatatcgcaagccattgtccagttgcccggtaattaacttttcatcctgcggtaaggcggcggcaatcagtcgcccggggagcaacagagttgccactaacgtcagtaagaaacagaggtttctcataattatctccatgcgaaaaccgggcgaatttacccggtaaagtaaaatccgaactattaaaatttcatgctgacatcaagccagaaagtacggccactggcgtaggtcgccacgccggtattcgttgtatcaacagcggttttgctatccagtacattgagaatatcggcactgatcgtcaggttttgttgtttcagaaattgtggcgtccaggacaagcgggtgtcccaggtcaggctgctatccagtttctcgtcaacatactgcttgtaatctgaatattcgctgatgtattgcgcattcgtcttacccaggataatgcgagctttacgcgcttcttgccaggtcagcgtattcgcccacaccaacccgctcggttgatgcgtgaaatccatgtttaaggagatctttagtggattattaaaatccgccactggaacgctatcgtaagagaccagattaccgttataaaccacccggttatcaccggtattgctctcctcataaccattgtttaacgacaagttgcccttgctcttgatatagctaaagacaatttgcgggttaatatctacctggctgatatgcaggggttcggccagttcaaaactgaggttaaacgaatgtgttttggttttgccatcgttgttatattcagtaatggtggttttagtcgcgctgtcggtacggctgcttttgctgatttgatcatgcgcttcacggtaaacatagtttgcacgcgcaataacgttcttaccgattttctgctgcaatcccattgccagttcatcgttataaggcgttttcaaatcctgataacgcgtcagggttttattgcctgataccgattccgtccagctattgcggatatcacgtaatcccatatcaagaatattcccgccatagtaacggttataaccggcggtaatcattgaggtttgatcagcaaaaatatcccattccgtcataaatcgcggggagatattgtggtttgacagatagttgtcatagtcataccgcacaccgggcattaacgacacattccgccagctaatgcgatccgccatatacagcgtgtagttgtcaattcccaggctgcctttacctttatggtaaatggtatggttagttttctttccggcagcattaatcacataggattcagactggttatggcgttcagtccatgcatcggaatagatgtattccgcgccgaagtagggttgatgcgaaacattacccacggtgaatttttgccagtccaggcgtgttttgaaggtgtaattatctacagcctgggaaatgtgtcctaatccgccacgggtgcaacgccctgaaatatcaccatatgtacatgaaagttcggtgtaccagatgtcatgatcgtgacgggtataatcactaatatgatcccaaccaacggtggtacgcagtttggcccatgcgagctgggtatccatatcccatgccagaccataggatttattacccatttcgcgatcagactccggaaaggtgctggtattataatcacggctggagccggtatattttaaggttaaatcgtgggtaaagcggtcgctggcaaaccaggtaaatttgctcaatgcagtatcgataacgtttttatactgtgccctgccggcgacaatgccgtcattcgaaacataatccgcgcgggtgatatcagactggcggcgcgataaaccggcggtaacgccaaagttatcagcgagttcctgattaaacgacaaggtataaaagttctttttaaaatctggagagtaataagtacttcctgaagaaccttgattaaatgcgctcttgttattctcatcgatatgcgatgttaaccagtccgaacgcgtagtgcgataacccagtttcacgctgctatcatcagcgttgaagcgtttgatctttgcatcaattaccccgccattgaagcgaccgaattcaaccggcacaaaactgtcataaagcgtcacattgtccagtaagctgacatcaagataatacccctgtgacatcccgctaatattggttgcactactggcatcggactcattcgctgggttcaggttattcgttgcactaataccgtcaatcaaataggcattctggtagggcgacgcaccgtgaatagagattttctccgggcgaatatctccctggttcaatgaggtactttgcgttgaatccatgcgtaccgcagggttggttctcagcagatcgctgatattgccattcccggtcggtaaacgctcgatgctttcactggtgtaatgcgtgttgccgtttacgggtacagggacaggagcatagaccgtcatctcttcaaaaacatgcatgtacatatttttgtcatcgacggcctgcgccacatcagcgccacataaaatgacgccaggaataagaactcgcttcatttatttatatctccgtacagcagggcttttattgtttttatataaccgcgctaatgtcacaaatatcatcgaccaggttccagacaccgggttgatgtgtaaccataatgacgccgcttgtggggagtttttctcgcactaaacgcagtaagcggattgcctcttgttcctcaagatgagaggtagtttcgtcaagaaatatccatttcggacgtcgtaaaattaatcgagccagggcgatacgttgtttttcgccgctggaaagaatatctccccagcgatcgtgatcatgaatacgcgcagccaatttccccagaccaacctgatgcagtacttcgctcaacgatttatcgtctacggacaggggaagtgctttacaaataatctctttcagtaagccggttttgattaacggtgtttgtgacacataccaactgtcagcaggagaagaaatatcacctttaaaccacggccagcagtgggataatgttttaagcagtgtggtttttcccgcaccagagtaacctttcagcaatagccatttgcctggcgaaacatgaaagttcaggttctctaatatgatcttattatcaggagtacgaatactcgcgtcagccacttgtaccgcatgttgacaatttttaggcttattcgtagggcgctgttcggtgagttgatggaactcatacaagcgatcgataaccgcagccagttcagcaagttcatcatatttataaataaaccagcttaaattgttcgataccagcataaatgcctggcgcgatttcatcagtccgcccagattgatctgtccgctaataaactgcggcaataacagaaagtagggaagaacgctaagcgagcgcgaataaatattctgccagtaatcaagccaccgctgacgattcattaaacgatgccagttctctttaatggtatgaaaattttcgctcaactcctggcgttgtagagactcagcattgcttagcgcaatcagttctgcctgcttattatgctgcacaagattagttcgaaatgtcgcttcgctacgttgtttttccacattaagtggacgaatacgtttaccaaccttatgggtaaataaagttccaccgatcacaatgagcacgacggtatagaccatatacccctggatactccattcagttccaccaacagtgaatgagagcgtacccgcgctttgccaaagaataacggtaaaggtgatcagcatgctaagtgactggatgaagccaaatgaaaggctgagcgttttgctgatcagtaagagaatgtcttcagcgatacgttggtcagggttatctgtatttttatgctcgccgtagatctgcgtgaagtagtagtttttatctgcaaaccagcgattaaggtagtaatctgttaaccattcgcgccagcgaatagtcagtagtttaattaaccatgttttgtttacggatattaatacaaagatccccagcagggcagggaaccaaaggacaagctgccaaagcttatcagtttctttctggcttagcgcattgaaaaaatcattattccagtcgtttaaccagacctgaattttaaccacgccaaggatcatggcgaggataataatgattaacaacactgaagttttattattcttacgcagccaaaagggcttcagcagacagagatactttgctatcaacatacaaaacgtaatgggaatggttatcattagcgaaaattgattgtgccacccaatgattatctatggcaatgatatactgatgaaatttatttaagtatcatttaacaatatgaaatataaagaaatatttaattttcagtggttatggttatactattgataatcaagggtattgctaatgccctgacgcatacctcgtcagccaggattttcgcaaaggaagatgatgaagacgaaacacccgacaggaatttatgtcgggtgccttgttaaggtcataagaaggaggctaagaatggagctaagggggagcgttattaattattctccatttgttttgcaacatccataatgtggtaaagcggtactctgttcttagctaactccaccatggcgttcatataaggtaccatggttgaaaaaaggattttataaccttcgcaaaaataggaaacagtctcattgtttgctttagtaatacgatgcttagggcaaccaccattgcagataggtttatatacacattgctgacatttcgctgaaatccgttttttttgcgctgtcagttgtacactgttcatcgttttgagttccgatttattaatgtttccaattttgtactgtggatagacaaaatggtcgcattcgtaaatgtctccattgctttcaacaaccagattatccttgcaggactcctggaaaatacaactggtatgcccattccccaaaaaacggctgacaaagctttcaaactgacggatgaaaatttcacccacatcgtttttaacccattgcataaaaatggttgacataaacttgccataagccgtgggaggcacagaaaaatcaatgatacggaatgtgttctcactatgaccactgaaatcaatattcggcgtcccggtttcgagcaattcgataaattgcatatgtttactgccgatagattttaaaaaatgataaacctcaagagggtaatggacattaatgttattaatgacggttaacgtattaaactctatttgatatgatttcagacgctcgatggctgctatcacttttgcaaaagtaccgttacctgaattactgcgcctgtagcggtcatgtagttcttggggtccatcgatcgagataccaaccagaaactcatgttctttgagaaaggcacaccattcattattcaataaaatgccattcgtttgtaatgcattaaaaattcgtttttggcctgcatagcgttgttgatagtgaataactttacggaaaaaatccaggccagccagagtgggttcaccgccttgccaggtaaaatagacctgattgccagacgctgcgatatattgtttgatgaactctttcagagtgctgtcatccatccatttttcatgagtaaactgcgactctttttcaaggtaaaaacagtaatcacatttgagattacattgaaaactggagggcttggctgtaacgtgcatcgctatctcgctcaataaggcggcggaaaaatccgccgcatgaaggtttagttatttcgcttcgcttaatgctttcttgatattgttaaacttctcctgatttacctcgctaagcggtggctggctgttatcgataaactctcttaccacgccttgcatctctttaacgacctgcggattggcggcggcaaggttatctttttgctgtagatccgtcagtttgtatagacctaactgattattttctactgtatagacgagcgaataatcgttatttctcaccgtataagagaattggcttaagtcctcggtgttggggttatgcgggtaatcgtctgactgatggcggacaaatttgtggtaattatcccagaatggaatgttttcctcatcaaaccagtgagaataagatgttatccaggtcagatttttatgtggctcgccctgtttcttattttgcaaccagggcagcaaggaaacgccatccagcttaaggtcttttggaatgctgatatcggctgcatcaagagctgtcgggtagaaatccattgcggaaatcagcttgtcataattaccgggttgaagttttcctttccaccacataaacattggggtgtgagtaccgccaggataggtctgactcttatagcctttttgcgccccgttcagcggcagaggaccatcgataactgcaccattatcggaggtaaagagaataattgtattgtcatactgtccgtttttcttcagttgttcgagaatgcgttttacaccctgatcaacagaataaacggaagcgtagtaattatctgctgtttgactaccggtattaaattgcttctgatattgctctggagcaggattatcatttggcagatgcggagcattataagccaggtaaagcataaaaggctggtcaagtgttttggcacgatcaacaacgccaattgcctcatcggttaactgatcgctgatataaccttttgcggggacgcgttcacggtttttgaacagtgaaggggagttgtaatatgccgttcctgcagcatggaatcccataaagtaatcaaagccacggttttgcggttgccattcttccgcagaaaaggtagtgaagttgtcatgatagtcacgcgtttgtttatcttccggcactggcacattactgatttttgacaagtgccatttacctactgctgcagtgtaataaccatgattctggaataattcaggcaagaaagtttctgttagcggaataccatcctgagcatcagtattggaatagacaccaaagcgggcgggcgctcgaccggtcattattgcggcgcgggacgggccggaaacaccgtgcgccacatagccgttagtaaaacgtacgccttcatccattaatgaaaggagcgtcggcgttgatttttgcgcagcttcaatggctttatctatccctattttgtaggtatcgacaacttcacgattttccattgtttttgggtcaaaagatcccttatcaaaaggaagttgtccataaccaagatcatccatggtcagtacgataatatttggctttcctttggtactgtattcagtcggcgtaaagtctgagaaagcaacgtttgttttggttgctttcagctttacatcatctgccgcatgagcagcaaatgcagccataccagatgccagtatcaaagatatcgaggtacttacgacacttttctttaatgcagacttcataaatgttcctcttcttattgtacttaattccaaagtaattttacgaagagaaataagttaatgtaagtgaagttagtcacataaatagatagcaaatttagctaaaaaaagggaaataacagtccataacgcattgacattactttctgttctactaagtaatttctcgccgataaacaactaatctattgatatttaataaattattgtattttactgacaaaatgccgaattgagatcataaataatcatgcaacaggttatgcaaatgcataaatatgtgatgaatgtcacttatttatttcaataaatatatcgcctaaaaacaacgcggggcagggaatggctgccccatttaattcttacgcagcgtgtgtggttgactactcgttagcaaataatcaaatagctaaagcattcatcgtgttgtccgtgttcatacccgtgcgcctttgacaacggtactccttagaaactctctttggactgttgccgaaatgtttgcggaacgcataaataaaataagatgtactcgcataaccacattgttcggcaattttattgactgaaccttctacgcgtatcaaattttttgcgtgctgcattctggcatctaaaagaatctgtgagaatgtcgtttgctcttgctttagttttttcttcaacaggctttcactaatgtacaggcagtcacaaatatctttcagcttccatgggtgcgccagcttcatgttgacaatatttctcactttcccggaaacggatagcacaccgttagttaatagtgtaatgaaacctttgcatgcggcaaaaatagacaggcaagaaaaaagcaaaagttctgaaaaattatgatgattgcgttcttccgagttgagataagcaatcatttcattaagcaatccagtcggtacatttgaagcacgtaaaaacttcgcaggaacaggcaccgtcactgtctggatgttagtgcattgtagatattttttaatggtattttcattaaatccgatttctttaaaatgccgctcataaggttcaaaatgcgtacgaacagcgttatctaccatcaggatctcgccgtcagagaaggcgtaatctttatataaaatgttagcgttgaaggcatgatgaataaatataacagaacaaacgagcgacattttatctccttaaaacaataaagtttttatcgatacttttttaacatttcatatttataatttgctgtttatttttcagtcttgcaaactattgataatgaaatgtgtaagatcccttgcaatgcgacccatttctgaaatacccagctgatcaattgccgaaaaaatggctatcaacgtaagtgtcagtaacaagacaaccacaattacagacatgatttctttatagttgtctctttgcgtgattttgtttttcactgtggtcgcatgcatttcaaatatgtttatttagcggataacgttaaaaatcgttaatcagtatgattaatataacaggctggataaaagaggaaataggactggcgcttcagtactgagcggagtttcttacagctgtaggcagaagtttatatcttatagtgtgtgatttaatttaatccatgtgagcaaattgcgcgataatagtcaatgaggaattcttctgctgtgcggatgacagcagaagaaatgaggaggagaattaatttgatggttctaattcaaccggaatacttttatagccaggaattccacttaatggatcgtggttatcaagtgttagcatgtgattcgattctggaaaataggtcaccagtgagcggtcagccatagggtaaatgaccacttttaatctatccatgcggcgtgagctacgtttaccgtctggcgtgagtgcaataagattaactctttcgccgttttttacacggcaaattttagcttgtttagcactcataaagaccacatctcgttgaccgaatacccctcgatagcgatcatccataccataaatcgtcgtgttgtactgatcgtgactgcgtactgtcgccatgaccagcttactgttaaacgctgaagagggatcttctaacagccctttactggtaatgaaattagccttacctgacgacgtcatccagcgcctttcagctgctgcgtttatcaggtgaaaaccaccaggatgacggatgcgctggttatagtcggcaaactctggcagcacagcttcaatgtcattgcgaatgcgatcataatcttccaccagatactcccaggctaccacgctctggggtagtgctgcttgcgcgattcccgcgaccactgcacactctgatttcagcattacaccggcgggttttaacacaccacgcgaggcatgaatcatcgacattgaatcttcaacggttaccgcctgcgcaccgcttttttgcatgtcaatctcgctacgtcccagaaccggcagaatatagctatgccgtgcggtcagcagatgagagcggttaagcttagtggctacgtgtaccgccagatctaattgcgttaacggtacagcgctcgcttcccgatctggcattgccagtgcaaagttgccccccatgcagatcaatgctcgagcttgccccgtacatatagcttgcatgctggcgattgcagcatgtccaggtgcatgaggtggggtgaagccatagcgctcacacaggcgatccagaaactctgcagacggtttctcggtgataccgacggttcggtcgccctgtacattagagtgacctcgtagtgggcagatacccgcaccaggcttgccaatgttacctttcatcaacagcagattgaccagttgctgtacgttctgggtaccatgttcgtgctgagtgatccccattccgtaacagataatagttcgttcggcagcggcatatgcatcagcaagttcggcgatttgtgtctgacttagtccagaaatacgttcgatatctttccactcggaattgagcacgtcacggcgtagctcgtcaaagccgacggtatgcgtttgaataaattcgtcatccagcaatgagggccgacctgcggcgcttgcagcatcatcgcgctcaattaacaggcgcatcatccccttgagcaatgccatatcgccaccaatgcgcacgttatagtaggcactggccaactgagtctcagagttcgtcagcatttcaaacgggttttgcggtgcggtaaatcgctccaggccacgttcctgtagagggttgatagcgatcattttcgctccccgtttcactaaagcgcgcaacgaagtcagcatgcgagggtggtttgtaccagggttatgcccaatgcaaatgactaaatcgcatttctcaaagtcttccagcaacacggtccctttacccacaccgatactcgctgccaatcccacactggtcggttcatggcacatgttggagcagtcgggaaagttattgctcccgtattcacgggcaaaaagctgataaagaaaggcagcttcattggaagtgcgccccgaagtatagaattcaacctgattgggatcactatagctttgaaggcgagcgccaatttcgtcgaaagcttgttgccagcttaatggcttgtaacagtcgctgacgtcatcatatttcaaaggctgagtgagacgtcccgcagcctcaagctcgtgatctccccaggtaagtaatgattgaaccgtattctcagcaaagaaagaggcatttacctgcttatccgtgacttcccaggcgattgcttttgcgccgttttcacaaatgtcgaatgacgcactgtgcttaggatctggccatgcacatcccggacagtcaaagccctctggcttattcatgtcaaacatggcaataacatcctggcgtatatccatctgcttacgtactgcattcgctacggatttaacagcaccccaaccaccggcagctccctggtaggattcaatttttttcttcatctgcttatcctgtgtggaaatgaattattaggatttgtaatagcgatgatgcacagtatatacatagggtttatcgtcaacatggatatataagagtaggggactactctcttactatttttactctattatcgttaaataatagagtagtataaatacgataagttaagcatcatctctcatagggtttaaattaacataattctcaatataaaaaataagactctggcttcaattgtgcgcggattttcttacaagtgtaggataatagccttcacaaaataattatccgcgcaattttcgtgaatggagcgcatagactaatgtcaaaatcacaattattcatagataaaagtgacaccaatgactgactggacggctccggctgcaaccttgtttcctgtttgtccataggttgcgcttaaacccagaggtactttgcttttatttactgtccccagggagacattttctcctgttgccagtgtttttccattacgcatcagagagacacccacgcccgatgcttttgttgcatctggtgctgtgttagcaaacacttgtcgggcactgtcagtggtggcacccgaaagataaaatgagagcttttgttcgctagagcaatatacaccaaggggtatttctgcgcttccaggaaagtccgggagattcacggtgacattacgactatcaacggtgcaaccgcctgttggcataacaacactgttatttgaaataatattccacgtaaaattacgcggatttccgcttcctaacgtggcaattttatacatatgaatacgggcaataacttcccctgcttttatgacaactccaccagccgctccgactggggtaatatagagttttaacggtaatggcatcggtgtcttatcaccaatatccaatacgttggtatttgtcgtcaacgggaaagggtaggtcacattattccagtacagtgatcctttatatgactgtagggagcctgcgaaagctgatccttgtaccaggtttatatgatcagtgtcgtaccagccgccgtaatcattccagcaacttatatgctgagacaagtctacaaccagattctggcccggttgtattacaggatcgagattaacataaacagaggttgtacctgctccaatacttgacccgccatcgacattacaactgaaggcaaaaactttgcctgcaattaatagaagataaataccgaacaggacctttatactgaatgttttacccatgatatatcctaaggttaaaaaattgatttaaaaaggaggaaaataaaatcaaattgatgttattgccaggtatagatcacattgattagcgcctcgatcgtaccctggcttgcgtttccattcaccgtgatagctcttgccttaagtggaaactgtgcattacgagtgatctcatcaacaataaccgttttgctatcgccattttttaacgtcgcatcctggtcatcccttagctctatctgaatattttcggcagtaccttcatttttgtaataacccgtattgtcagttgaacctgtcacgattgccgtcactgcacttgtttcaatcggacaatcggttaatgacaaagtaatattgtgccagccagatgcagaaccaggttgttgcagattgcgtgtataaagatccccgagattaacgttagcttctttggtttgaatagtgcatggtttagcgactacccgaccattaacagtgatagtgacatcggcggcctggagagttgctgtgaataatgtgcaaaacgtagctaacaggaacctcttgtgaagtcttttcatatctgactctgattattgaaattcaagggtaaatgttgccgaagcgctcaccagtcctggattgacggacttctgagttgacttcaaacgagcggagtaaggcaaaatattgttctgatctggtaccaatgggatccactgcatcccggcatgaaggtcattcaatttcaccggacgcatatttccgtccagtatttctatacccaaaccggaggccgtattgcttccttcatctagtttcaacagagtattattttctgcatcctcaataccgttaaatgcaacccgaacccccgttgtccctttactgcattcacttaacgtaatctgaaaagggacggctggacttgtgctaccggtcgttggaaattgtctggcactgtttttttggagatctacggtaaaattaagcgaatccgatgagactgtgcagccataatcgaggacgcgcccgctaattttaataacactatctgcggataaagcagaataggtggttaatcccagacataaaccgaggaaaataatgttattgtatttcataatctattgttccttagcgacagattgctgtctgctggttcagtaaggtaccaggagaaacttcaggaagcttgtactcgacaatacagtttgagtttttatctttgccccatgaaacctgtaatttccctgactgtggaagtccagtcagataaacctgaccgttttccgcgacaatgctgccatttttattctctccatgtgtgacaattgcaccgaatggaacgctcttattaccgtacttcaacgtcattaatactttcccgccgatttgtacattaaatgttgctctggcaatagcaccgtgagttgggatgacagtgaccacggtttcatccagttcaacattatctgcaagggaattcgcgttaagagcgacacgattttctctatattctgtcgcaaatggtaatatggcatagccacgccagtcggtatgaataccggtctggttctctattttgacattatcagcgccaggagccttaaccagaaccattgtgtcgcccagcggctgtccaaaggtgatgccatcagcatgagcaataatgccaccactcattccgtaataaatctggctgctgtcaccactccgactgtaaccgacattcgtattaccgtaagctccacgataattaagagaactgtaaccactggtgccagacgatgtattacccccgtgggtgttaccgacctgaacactataattcaggttattatccggcagtagagtgccataaacccctgataggttggtcatgccgcctttcaaatcgtttgacatactgtaactggcgtttgaattatgaaatgccgactgactatctgtacgcatccaatgactaaagggaacattaagcgtaaaagcgagtaaatgatcccgatcgttttgccatatattattggaatagctgtaattcagcgaagtcgtaatatcaccaaacggcacatttaatccaaatgatatttgctggtcgctgcgtgacgtgttccagtaactttggcgactggcactgaaaaatgtcgtaccgtaatttccaagctgctgagagatgcttatttgttcctgaccacgcttactgtagaacagattaaaataatcaataaatagtgtctgctcactggtgtctccggtaggaggcttgacggtgtaaccactcattcgactgtatgcactgtcggataagttataaaaaccttgcgtagaatagcgatatcctgcgacctggatattggttcccgtctggtagaaggatttgctgtagacggatttaaccgattgtccgctgtgacgggtgtcatctgcaagtgtcgtattggcctgcgtaatatcgaaagaaaaggcaccaaaaagtcctaaatctttaccaataccaaggttgaaggcctgataatcttctgcaatttgcattccgccataaggtgtccagtttcctttcagaccatgcatcaagcttgcttgtacgaacttgggggtgctttgcaggttatttccactacgatattcccccatggcaagtgcataacgcgtatatccagcacgttggagaaccggaacagacgaataaggaacatataatgtctgaatactgccgtctgcctcttttatggttacttgcagatcaccaccattggccgcagagttgatatcatcaatagtaaaagggccgggtgggacagtagtctgataaacatcgtatccattctgttttacactcacttgtgcggtgccacgagcaataccatgaatcaccggagcgaaaccatgttggctatcgggcaacatcgcttctgttgaatttattttaaggccacgaaagttcacactgtcaaaaatatcgccatcggtataactatcacccactgttaaccgtgagcgtaacggaataatgtcacgttcagccgacgtattgatatgctgccatttattgctgtcagatgaattgctactcccactgttataactccacgttgagttatcgcgcagtcgccaactaccaatgttgatgccactctgtaaattcaaatatgcatagttggattttcctgcattatggttactacggttattaatagaattaccattaaaactatagtttagtagcccggcatttattccttcttcccacagatcaggagaaacatagccgcgagccattctgccgacatatatttgcggaacggagagtgacagatgttgctgaccaacatcaaactcagatgatgcgtcagccaaacgatcctgaagtggtgtgcatgcgctgttgtccggcacatgtttatctgccgaatgttccttgttgtctaataatgctgatttttttatgccaagactgacaagaaggtctgtactcaggcatgggatgagatctgcgttattatcatctgcaataaaagtaatatcccgactagccataaattcgtcgttcaaataaatgtcgacccgatatgtaccaggtggggcctcgcgtcccttagtaaaggcagataaatcgacagattcagcaaggtcattgcttaaaaaccgtggattaaaataatactctgcgtcaacgggaaaaaccgcagttgctaagccaagggcaaaggtaagccgtgcaaagcgaggcagtattaacacctgatgcatacgatatgccttaaatgcggcacgaaaggctgtcatttttaatcccgattgagtttattattaattaggtcactggcttactgcatggttgccttaatacgcggagttaatgcaccgtaatcattgattgtctgaaaactgatatccccggttacagcatgcgggatatccaccgatacttcaccttttggcggcaccatggtgtttgggagattgctatttcctgctttcatatttgttacggtaatgaagtagggcgttggattaataagagtgagtttgctaccgctgcgacgaaaccgaagcattgcaggcgcttcttcaggtgccattgccagatgcgtggggcgataaaacatttttatgcggctaataattgccagctgtaatgtattctcattcttctggtctttttccatagcagggatagctttaacattaacccagaacaggctttcacggtcgcctggtaactgatgattagtggcgttgattatccgaagcgtattctcttttttaccttgcatggaaaaaagcggtggggtaatgacaaactgggtatctttctggtcacccgcattttctatccatgactgaatgagatagacactggcaggatcattattcgtgacaggcaataaaacctgtttctggtttgccggataaattacccgcgtcgcaccaagtgcgacagctgcgttggcaatggtgctatggcaagcaaagagcaataaaagtaacactgtcgccataaaggaaacagagtagggggtacgcgtagtttgcatctgatgcattctccatgtgttaagaggataagcggggaaaccgttacatcagacaatcggtaaatattgctaatgcattggcgagtcgccggttttccagacttaatgcgtttgtaataaatgttggttctcttttgataggaaaaccttgctaccaagtaaatattttaaataacagcaagtttaactactgttgtttattgatcgtttagatattatgtgatttttcataccgctccaaaatacaaaccatttttcattaataatgagatgaacattggtgaatttctcgggtgtgcgtagccatgccacacacaccctgtttcaatttcagatgacgcatagtcaccttaagagtgaattatagatattgaactttgaaggtcgcatcagcgtttgcagtaccagctactgactgcccgagagcaatataacgagcctggaacggcagtatattcgtgccatcaatcaagtcagttttagcgctaaaagtagcaccatcaagtactaatacctcccctgtactgtccaaaatttggataccgacattttgggcagagcctgccgctgaactctgcagcgctaatgtatcgtcattactggtgacagtagtacccaggaatgcaacagctgcattactggaaacattggtatcacaatcattcagcttgatattgaagccaacggcggagctgaggtcacccgctttagccaggcgagaagaacgaacctgacccagctcaacagtttggttcattgattctgaatcaatcgcacaagcggcatttaccacttcacctttaaaatgaattacaccgccattaacagtggtcgttactgattcatcaccctcggctgcgcttaccgcagcagacgacatcgccaacacagaaacgacaataataccgacatgtttgagtttcataattctccaaaatttatatttaagtagctgaataaagagagttaacaattaagttattctgttattgcttataaaacaagaatcattcttgattggatgttgccctgagaatatagtttccatggttattacatttcacgaagaatgataatatctttaaattacaaggacacctattcacaacaagtttattgctgcacttgttgtagagagtatttgtaaaaacattttatgtcgctaaataacatgacgatttcattatgcatgttatttataaacagcgactaaacagaatattattgcgaacaagggaagtgtcaggaaaggtcaagaggtactaatagtttatatggctataaacattagctatgattaatatttgcctggtgaaactaacaccaaattgctgtaactctctttgaatcataaactgaaggatgatgcagcacagttcctcgtggactatcctggctactacatgaccaaacgcggatatcatcctcgagcagtcaactctggccatctttttactcagctatgaggacctgatcgtcgactttgctatctgcatgatgaatctcctcagcagcagatgcagtatttaccgaaatgaattccatgaataatgcagtaattagtagtgctttcatatctgatacctgttttaaacgatatatttgaaagttgacgaatatcggaaatagcttcctccttcttgatctgtaaatatacagttctaagctgtcataagactgactgtcatatgacaacgttgttagatttttgaatttttcgaatacagattcaggtcgttaataacgcactcaggttcttcagtaaggggcatattgtctatatcgaaaaccccatcatttttttgtggattatcattccgcagctctgcaaacagaggagtgagatcctgctgtgcttctcctcgctctgcgaccagttcgaacgttttattttttgccgcatcgttgctcagagctgttacaagaacctgggcgatttgctcccgggagataacaccatcttccggcgttcccgcatggcgtctgtccccctgaagcatgacgattctgtgctcatcatcattgttgtaatcaaaccagccgggtctgacgatagtgtagatatgcccactggctctgaccaggcgttcagagcgtctcttccagtcatgaacttcagtacgttgattccagctactgagccgctcagttacgccaatcgttgtcatcagggcgatgcgaacaggtgtatccatgaatattcgcaaaatgttacgtacaccgccgtaatctattgctctggcgccaatacgtccctgaccatcagagccgagtgtaaaaatgatggcatcaatatctttcggtaaatcggtaagtgtttcaggtattgaaacatcgccatagaaaatatctgttccacgagggagtaacttgattttccgccgattcctgaccagagtcacgggctgatggcccattgcaatagcagtattcacaacatgaataccaatacttcctgttgcgccagcaacgagtattctcatgataaaccttctgataattcagccttatttttgatacagccagaatatcaattatcattattgccagtaacgaggctaaaatgattgtgtctatgaacacccttcatgaatgcgctttgaagggaatgcttctacaaggaaatcatcaatgcttaaagaaaacttcaacgaactgcaaatctttcttgtggtggcaagagagcgaagttttaccaaagcagcgagcaaactcggcgtctctcagtctgcacttagccatgcaatgaaggcactggaggaaaggttaaatatccgtctcttaacccgaactacccgtagcgtggcccccacggaagcaggggagagaattattgcctgtcttgagccacgtatagatgagcttgagcgcgagctggaatcacttatccaactgaatggcgcgccatccgggaatattcgtttatcagccggggaacatgctgcacgcagtctggtctggccgaagttaaaatcgttcctcagagaatatcccgaaatcaatgtcgaactggtggtggataacggttttgtcgatattgttgacggtcgttttgatgccgggatccggctgggtgaaagtgtggataaggatatgattgcagtgcgaattgggccggatatgcggatggccatggtgggatcgccggcgtattttgctgcaaaccctgcgcctgaaacgcctcacgaactacaaaatcatcgctgcatcaataacgtaacgtggataaacctgcgaatcgtattgaagatatccacggtatggctgatttcatcagccagtatcctggtgttgatagcacccgtattggtttgttggggatttgcgggggaggagggtattcacttgctaccgccgagacggacaaacgattcaaatcgattgcaaccattagcatgtttaattcaggacttgtacggcgcaatggtatgcaggattcacagttggatactattcaacaacgtcttaagcaggcttcagatgcacgagctcaggaagtcgccggtagcgaagtgctttactccggtgatgccaacctgactgatgaacagatcgctaaattaccttttgcgttatatcgccagggctacgagtactactggaaaacccacgcacacccaaacatattcagaagcgtgagggatatagtgccatcaaagcgctggctgctgtaaacaacgcaattatccaactcatggtctatggtgtgccatcactgaacagaggttgaatttttctaccgaaacgggagggaagtcagaaatcacaacgtattgatttatctgtgtgtggatgtgaatggtgaagtaaaggaccttcacaggcaatttaacataatatacattatgcgcaccaacataaaccaagggagaatccagtcgttggcggttcatgattgttctgctcattaacaacgaccaaaaccccatatcttacttaataccgtattctggggcttaaccgaccgtgcaacctcaacacattggtttcaactgccgtcaccacgttctccggaaaatctgtcggtaatgaattcttcacgttatccagtgctgccggaatcattctggcaaagtcactcaggatttcatgcatctgcacttccgggaatttcagcacctttgctgtcgccagaaaatgtcgcggataaattttatcgattgccgtttttttgcctttggatgcgttaagccccattgccagtttgagatcgctgatgtgtattcccgtaccgccaaggaccggaaatgccgaaatgatgtcataaaatggtgtgagccgataactgccgccagcctgaataaatacggagaagttttttgcatggccatctgttgcgccaatcaaccactggaagacctgaaacttcataaaatcatagcgatctttcagcgcctcgctggaccccatcaaaaaagccataatttgcgcgataccggggcctccatctgattcatatttcaccgatgaaggtaaaccgaatgtctggcacatatcctcctgtggcaagcgaagtaaaaccgttcgctcagtattccaacgcctgtcaaaacgtttgaccgctaacgcgcgcacccttcccgctttaatgatttctgcgtccggaacattcaacccgagttctttcgccagcagcaaacagtaatactcattatcaacgctttggctaagatcgagcgtcgcattgggctgtctgatttcgccaatcggcaatttgataatgtgcgtcgttggcgttattcccttcggaatgcaccagtcattgcctattctgagcagcgcagtcttctcctgtgcgccagcaaccgagatgcgaaagtcattttcttctctaatcatgcctaacgggatatctgctttataagccgttaatacttcttcaagtctggcttcagtaagcttttcccatgccattatcggacacgttacggtttcatcttcggggattaacgtcacggcaccaacgctatctcgccctatttctgacaataaatcaaacggttgtctggatttagcatgataacgtttaacgatccggtcacgtacaatcgggctatcgggtaacaggttatcgaagaagttaaatacggcatcagaggtgatattccccctctgcaatggcagcgaaagtgacaacggtctggcataacggctggctaaccactcaggtgcatacttaaaggtgtgcgcgccgttggctaacttcgttaactcgcctacccgctggttgttcatccaagtgactagtttaggcattaccactccaaatcttgctgttctgctgcttctggcgaggcatttttcgcgtcgcatagcgtcattgagagttcaagcgactgtaaaatcttaaaaaatgtcgtgagcgaggtattgtcaggattgttttcgaaattggaaattgtcgcctgcttaatgccgatttttttcgccaactcgctctgcgtccagccgttttgctggcgaaccagtttcattgcattcgccaattgcgttgggctatagatcttctgaaagctcatcatgtcatacgtccacagcaaatttatccgcttaaggggatattatcagttttatcctttagtgaggataaagtcaatctggaaacacatcttatccgctctacgggataaacgctgcgatatccgcgatcgcggataaaaaggaggatttaaaaaagcacatcctaatgcggtggcttctttgactaccggaatctgtaatcttaatgacctggccgcgtaaaaaacgtctgttcaatggggtgatgccgtgaggcgaatttatcagttttatctacaattggggtaacgcgctgacgggagtaaaaaaatgtctgactggaacccctctttatatctgcactttgccgctgaacgatcgcgtccggcggtggagctgcttgccagggtgccgctggagaatatcgaatacattgccgatcttggctgtggcccaggtaacagcaccgcccttctacaccaacgttggcctgctgccaggataacgggcatcgactcatctccggcgatgattgctgaagcgcgcagtgctttgccagactgcctgtttgtggaagcagatatccgcaactggcaaccggaacaggcactcgatctgatttttgctaatgcctcgctgcaatggctgcccgaccactacgaattgtttcctcatttggtttcgttactcagtccgctgggcgtgctggcagtacagatgccagataactggctggagccgacccatgtgctcatgcgcgaagttgcctgggaacaaaactacccggatcgcgggcgtgagccgctggctggcgttcatgcttactacgatattctgagtgaagccggatgtgaggtcgatatctggcgaaccacttactatcaccagatgccgtcgcaccaggcgattatcgattgggtgaccgccactggattacgtccgtggttacaggatctgaccgagagcgaacagcagcattttcttacgcgctaccatcagatgctggaagagcaatatcccctccaggagaacggacagatattgctggcatttccgcgtctgtttattgttgcccgccgtacggagtaattatcacgtcagctggtaatggcgatcgggaagaattttcgctggaatttctgcttcatcgttcatctgtaacaggtcaatttcaatagcgttgcagatggcatccagcggtaaatcattgttttcattaccgaagggatcttccagttcttccgccagacaatccagcgaaataaaagtgtaggaaatcagcacagagataaaaggcgtcatgtaatgcaggtccacgaccagcgcaaacggcagcatgatacaaaacagatacacggtgcgatgcaaaatcagggtgtaggcaaagggaattggcgtataggcaatgcgctcgcatcctgccaggaccgctgaaatatcattaagccgatcgttgaggctaataaacaggatatctgaaagttgtccattgcgtcgctgaaccgccaaccactcccccattattaacaagatgtggttagctggagagttagaagccagtacacgctgaagatcttcagtcttgagataatgagccagcacttccgcctgtggctgtttgcgtaatgtcatgcgtaaacagtgggcgaaggcgatttgcagccgggcaaactcccttacacttgccgaatccggcaatgtcgtttttacctcgcgcagtaacgaccgcgaggcaatcatcaactgcccccaaagttttcgcgcttcaacgtaacgggcgtaaccggcattattacgaaaaccaagaaaaatggcgatggcgacaccgagaatgctgaacggtgcgagggtgaatttaatgcccaaatgcgtgtaccagggcagcatgaaaataacagcgatagaaaagagaaaattgagtagtaagcgcgaggatatcttggataatactgaaccgtgccagacaaaaatacggcgcagccagtgttgttgtggacgaacaatcatggttatcttcaggcgtggaaaagtcgccctattaaacgtgattacgatcacattctcaagacactacttacaaattacctacaagcttacaatattaacaggtgctgcatgtggcacctgttaatgataaagacgcataggatgttgtaactaatatagtgaaataagaaacccggtcgaaaccgggttcagagtattagcacaacggggcgtacagcttcgcgcatccctttttcgagaatcgcatccaggtcattagcaacctgctcgaccagaccaggcacttgcgtcaggtcctgctcccagtggtctttttctgccaacacaatcgctaccagttcctgggtcccgataacacggtcacgatactggctccagagttgctgataacgttccagccagtgtgcatcgtcctgtaccggatatgtttctccattacgctcaccgcgatagaacgcaatcaatgccgctaatgcgaaagtaaggcgcgccggaagtgtgccgtttgccttctgccctgccagcagctgcggcaggatgcgtgtgcggaacttggtcataccgttgagcgcgatagacagcagttgatgcttgatgtacgggttacggaaacgtccggtgactgcactggcgaaagactccagctcatcgcgtggcaaatccagtaccggaataatttcttcgtagatggctttttcaacgaatgcgcaaatttcagcatcgttcatcgcttcacctacggtatccagccctgcctggaacgccaccggcaccagcgcggtgtgcgcaccgttgaggattgccactttgcgttctttatacggtttaatatcgtcaacgatcagcacgttgagcggatatttgtccagacgaagttcagtcgctaaggatttcggcccctgaatcacaaacaggtaaaagtgttcagcggtgtcgaggaaaccatcgtggtagcccagttcttcttccagtttagccacttcatcacgcggataaccggtaacgatacggtccaccagcgtagaacagaagctgttagcctgatccagccattgaataaatgcttctggcagtgcccactcttgcgcatagcgcagcaccagttcacgcaacgcgtcgccattatagtcaatcaactcacacgggatgatgatccaacctttatccagcgcaccgttgaaatggctaaaacgttcgaacagcagacgggtcagttttgccggataacttaccgctggcgcgtcatcgaatttatcgcccgcatggtagctgatacccgcttcggtggtgttagagaaaacaaagcgcatttccgggttgtgagccagtttcaggaattcatcgtattcactgtagacgctgatttcacgattaaccgagcgaatcagacgcgcgtcgctgaccgcttcacccttctcattcaggccacggataatggtggtatacagaccatcctgcgtgctcagtgacggcgggaatgaagtttcaatcggacgaacaacgaccacgccagaattcagattggtgtgctcattcaggagatcgatttgccagtcaacaaaggcgcgcaggaagttaccttcaccaaactgaatgatacgttctggatactgtgcaccgggaaaatcgcgacgatttagtgttttcacaatgggttcccttctgattagtcatacaacctgtttgaattggtacgacaggttagcaaactttaatacgacgaacccttgttttgatcaactactgatgattaatgagcagttttatgagaaaagtgtggcgcggatcatggtttaatcgaggaaacaggccttttcttggatcataaagtggtagaacacattgcatttaattcgctctgagtaaataaagatgtcagacaacttcctcaccgtaacgcatagtgctggtacggttgcgcccatctttcttcgagcgatacagacacgtatcggcttcgaccatcaatttattaaagtcatcggtcagcgttcggtacgatgcgcaaccactaccgacgccaatacttaccgtgagataaagcgttttttgttgccaggtgaacggttgaagttctacgcctttacggattttttccgccattagcaggccatcgacaggattcaccgacggcactgcaacagcaaattcttcgccgcccattcgcgccaccagccccttatcaccgacaatcttctgaatatgctgggcaaacacgcttaacactttatcgccacattcatgtccatagttatcgttaatgcttttgaaatagtcgatatcaagcagcatgaccgtcagatgttgtgtctgtttcagcgatggacttttcagcgcctcataaagaccagaccgtgagtaaacctgagtcagaaaatcaaagtcggctcgcagcgcaacttgcttcattagcgaattgatcgctgccacgctaaaggaaaccataattgggcatatcgccatcgtggcaataccgagacgtgcggagaacatttgcggaatagagaacggcgaaccgaccgagatatcaatcaccgaatttgccaccagtacgacttccaccgcaccggtgacaaaggtcaacagacatgttacctgcggcgtatagcgcactgcacaccagattaatgcagggagcggaaacgccagactccccgctccgccaatgactaccgaggcaataaccgacacaataagcgcgatagcaggcatcatctgctctgctttaaagcgcggcagtactccaggaattgccaacgtcagcatacaaggcacgatcaacacgcccgttgagaattgctcactaaaccagtcggcaagcaaaggccagaaatccagactatcaatactgaccgaaccaatcgccccgacaatagcgcataataatgcggcaagcagacagtaattaaatagccgtaaggcacttactggctcatacttattttttcccagacgcttatcccccgcgaccagtaaggcgacggtaacaataaacatcatattggagaaattgatagccagtgaaaccagcccccattcggtggttatggcatcataaaccagcatcgccacataactgatcgcatagtaatgcagtcgattaagccagacatagcgggcaaacacccccgccattacgccattcagcggccagaaaagagaaagttcgtgaaccagccgtaactctgcaccaataaaatagaacagcgtggttagcacaaaaatagcgatgctattacgtagcagatgaccttcctggaacaaacggaaagttgaaatgggctgtacatgcattaattatctgtccatacaattgcgggtggcaattatctcaacgcaataagtaaattcttagaaaggatagcatgttcgctgacaacggcggcaactaaagatacctaatgaatgccattttatcgatttccgtaattatcatggctgattcatctgtataaccagccagtggtagattaccgtcacaatataacgttgttgctcctcacttaacgcttccccctgaggaatgttatgccacttagccagacaaccgcgacaacaggtcgcggtggcgtgttgagcgataaaaaccggatgcccgcgcatgggggtttgcttaccgtcgttagccggtaatgccggagcaagacgtttagcgacaaaatccgccgcatgttgttcaatgactggcgcgcctttctccagacaatactgacgctctttcacacccaaacgaaagcgagagcgaaattttgaacgggataaacgcgcgaagagtggatcgagagactgcattaataaactgaacgccctaattgtttcgtcaattgttcaaggacggcaatgcccgcaagcgagttaccggcatcatccagttccggactccagactgcgatggccatttcatgcggaacaatcgccacaataccgccaccaacgccagattttgccggtagtcccacccgccaggcaaactcccccgcgttctggtacataccgctggtcgccatcagcgcgttaatttgccgcgcctgcattggcgtcaccacaggttcatcaatatgaatagctttcccctgattcgccagaaagacaaacgtccgggccagctctacacagctcattttcagagcgcagtaatgaaagtagttttgcagaacggttgtcacgtcatgatggaaattgccaaacgacttcatcagccaggcgatagccgcatttcgcgcggaatgttcaaattcggaacgcgctaccaccgtatcgtaggaaatatcagacacaccacttaagccgcgcacgacttccagcatacgttgccgaggtgcgcttaatcgcccttgcaacatatcgcagaccaccagcgcaccggcattaataaacggattacgcggaataccctgctccatttccagttgcactaaagaattgaatggtgatccagacggatctttgccgacgcgttgccagatttcctcttcggagtaatgacgcatggcgacaacgagactcagcactttggaaatagactgaatggaaaaacgttcttgcgcgtctccggcctgaaaaagctgtccgtcaacggtacagatagcaatccccaatcgggaaccgtctaccgtagccagcgccggaatataatccgcgactttaccctgaccaatgagcggccgcacttgccgcaagatgttttctaaaattgcattatccatggcgactgccactttctactcctggaccgcaggtctgaaaagacctgcgagtatatcagagctgaatatgtagcgtcagatccggtctttccacaccgtctggatattacagaattcgtgtaagccaaaatgggaaagctcacgcccaaagccactcttcttcacgccaccaaaggcgactcgcgcatcgctggcacaataaccattgataaacaccccaccgcattccagacgtgccgccatctgtctggcctgtgtttcgtcggtggtgaaaatggtcgctgaaaggccgaactcactatcattagccagttccagcgcatgttctgcatctttcgcaatggtgattgccgcaacggggccaaacatttcttcccgaaacgcggtcatttctggggtaacattcgccagaaccgttggcggatagtagttacctgccccagccatcttttccccgcccagtaacaaacgcgcaccctgcgccagtgttttttccacctgatgatgcagctcatcacgtaaatcaaaacgagccattggtccgagagcgttctcttcatcacggggatcgcccattttcaaggctgccgcagctgccacaaaacgttcggtaaatgccgaagcaattccctcttcgatgataaagcgttttgccgctgcacaaacctgtccggtattctgataacgtccggctaccgccgctttcaccgccagttccagatcggcatcgttaagcacaataaacggatccgaaccacccagttccagtacgcattttttcagtgccgctccagcctgtgcgccaatagccgctccagcacgaacacttccggtcactgtgacagcagcaatgcgcgagtctttaatcatcagactgacaccgtcgttgtcggcattcagccagccatatacgccttgtgggatacccgcatctttaaacacctgggcaatgagctgtgcacagcccatcacattcggcgcatgtttaagtaagtagccgttaccagcaagaatgatgggaacagcaccacgcatcacctgccataacggaaaattccacggcataatcgccagaatcgtccccaacggtcgatactcaataaccgcctgctgattttccaccagcgtaggttccgctttcagcattgctggaccatgttctgcataccagtcacacaaattcgccgatttcgccacttcagcgcgcgcctggttgattggtttgcccatttcacgggtgatcatttgcgccatttcttcgctacgggcgcgcagagccttaccgatatcacgcagtttttcagcacgataatctatatttgcctcgcgccagtcgcgaaagcctgctgctgccagctgaagcgcgttttcgatatcgtcaacaccagcccacggcagcacagaaagttgttcaccggtggcaggatttatcgaaattgcatgagttgccggagtaatggtcatcggggtatctcctttatgagtcatggtatgaagatacgcagatttactcttgctttaaaatgaataatattaagccacttattcacgaatcgagaatgttatggatctgacccaactggagatgttcaacgcggttgccgaagctggcagcattacccaggctgcagcaaaagtgcatcgcgtgccgtcgaatctcactacccgtctacgtcagcttgaaacagaactaggggttgatctgtttattcgcgagaatcagcgtttacgtctctcgcctgccgggcataactttttacgctatagccaacaaattctcacgttagtggatgaagcgcggagcgttgtcgctggcgatgagccgcaaggtttattttctctgggatcgctggaaagcaccgctgcagtgcgcattccggccacgctggcggaatttaaccgtcgttatcccaaaattcagttttcactttccaccggcccttccggcactatgctggaaggtgtgctggagggaaaactgaatgcggcatttattgatgggcccattaaccatactgccattgacgggataccggtataccgcgaggaactgatgatcgtcacgccacaaggacatgcgccagtaacccgtgccagtcaggtgaatggcagtaacatttatgccttccgcgccaattgttcgtatcgtcgccacttcgaaagctggtttcatgctgacggtgccgctccgggaactattcacgagatggagtcttatcacgggatgttggcctgtgtggtcgcaggagcaggcattgcgcttattccacgctcaatgctggaaagtatgccggggcatcaccaggttgaagcgtggccgttagctgagcaatggcgttggttaacaacctggctggtctggcgtcgtggtgcgaaaacgcgtccgcttgaggcatttattcaactgctggatgcgcctgactcggcaaaacagggttaccaatgagctatttttgatagttcatacggctaatatgctctatatagtgatgttccgatgacttatgactatatggggcaaatatggttacgccagtaagcatcagcaattacatatctcttcctgatgattttcccgttcgtaatattgcacctcaagtaaaagaagaacaggcccccttcctgatcgtcattaaaatgtgatgttaacaactctctgatgcgtgacagaacaaccgtcagagagatggaaatgcgatccagatcacaaatgcattgtattcacatcattaaccgttttaagatcatttcatcactttttcgcaactcacccgataatctgttatgacaacaaacactgtttcccgcaaagtagcgtggctacgggtcgttacgctggcagtcgccgcctttatcttcaataccaccgaatttgtccctgttggcctgctctctgacattgcgcatagttttcacatgcaaaccgctcaggtcggcatcatgttgacaatttatgcatgggtagtggcgctaatgtcattgccttttatgttaatgaccagccaggttgaacgccgcaaattactgatctgcctgtttgtggtgtttattgccagccacgtactgtcgtttttatcgtggagttttaccgttctggtgatcagtcgtattggtgtggcttttgcacatgcgattttctggtctattacggcgtctctggcgatccgtatggctccggccgggaagcgagcacaggcattgagtttaattgccaccggtacagcactggcaatggtattaggtttacctctcgggcgcattgtggggcagtattttggctggcgaatgaccttcttcgcgattggtatcggggcgcttattacccttttgtgcctgattaagttacttcccttgctgcccagtgagcattccggttcattgaaaagcctcccgctattgttccgccgcccggcattgatgagcatttatttgttaactgtggtggttgtcaccgcccattacacggcatacagctatatcgagccttttgtacaaaacattgcgggattcagcgccaactttgccacggcattactgttattactcggtggtgcgggcattattggcagcgtgattttcggtaaactgggtaatcagtatgcgtctgcgttggtgagtacagcgattgcgctattgctggtgtgcctggcgctgctgctacctgcggcgaacagtgaaatacacctcggggtgctgagtattttctgggggatcgcgatgatgatcatcgggcttggtatgcaggttaaagtgctggcgctggcaccagatgccaccgacgtcgcgatggcgctattctccgggatatttaatattggaatcggcgcgggtgcgttggtaggtaatcaggtgagtctgcactggtcaatgtcgatgattggttatgtgggcgcggtgcctgcttttgctgcgttaatatggtcaatcatcatttttcgccgctggccagtgacactcgaagaacagacgcaatagttgaaaggcccattcgggccttttttaatgatacgttttaatgatttccaggatgccgttaataataaactgcacgcccatacataccagcaggaatcccatcagacgggagatcgcttcaataccacccttgcccaccagccgcataattgcgccagagctgcgtagacttccccacaaaataaccgccaccaggaaaaagatcagcggcggcgcaaccatcagtacccaatcagcgaaggttgaactctgacgcactgtggaggccgagctaataatcatcgcaatggttcccggaccggcggtacttggcattgccagtggtacaaaagcaatattggcactgggttcatcttccagctcttccgacttgcttttcgcttccggtgaatcaatcgctttctgttgcggaaagagcatccgaaaaccgataaacgcgacgattaagccgcctgcaattcgcagaccgggaatcgaaatgccaaatgtatccatcaccagttgcccggcgtaatacgccaccatcatgatggcaaatacgtacaccgaggccatcaacgactgacgattacgttcggcactgctcatgttgcctgccaggccaagaaataacgcgacagttgtcaatgggttagctaacggcagtaacaccaccagccccaggcctattgctttaaacaaatctaacattggtggttgttatcctgtgtatctggtttatcagcgaaaagtataaggggtaaacaaggataaagtgtcactctttagctaaccttgcatcgcattgaccaaaacttgaaccgatttagcaaaacgtggcatcggtcaattcattcatttgacttatacttgcctgggcaatattatcccctgcaactaattacttgccagggcaactaatgtgaaaagtaccagcgatctgttcaatgaaattattccattgggtcgcttaatccatatggttaatcagaagaaagatcgcctgcttaacgagtatctgtctccgctggatattaccgcggcacagtttaaggtgctctgctctatccgctgcgcggcgtgtattactccggttgaactgaaaaaagtgttgtcggtcgacctgggggcactgacccgtatgctggatcgcctggtctgtaaaggctgggtggaaaggttgccgaacccgaatgataagcgcggcgtactggtaaaacttaccaccagcggcgcggcaatatgtgaacaatgccatcaattagttggccaggacctgcatcaagaattaacaaaaaacctgacggcggacgaagtggcaacacttgagcatttgcttaagaaagtcctgccgtaaacgaaaaaagaggtatgacgatgtccagacgcaatactgacgctattaccattcatagcattttggactggatcgaggacaacctggaatcgccactgtcactggagaaagtgtcagagcgttcgggttactccaaatggcacctgcaacggatgtttaaaaaagaaaccggtcattcattaggtcaatacatccgtagccgtaagatgacggaaatcgcgcaaaagctgaaggaaagtaacgagccgatactctatctggcagaacgatatggcttcgagtcccaacaaactctgacccgaaccttcaaaaattactttgatgttccgccgcataaataccggatgaccaatatgcagggtgaatcgcgctttttacatccattaaatcattacaacaactagttgataacgtgacaacgtcactgaggcaatcatgaaaccacttttatccgcaatagcaactgcgcttattctcttttctgcgcagggcgttgcggaacaaaccacgcagccggttgttacttcctgtggcaatgtcgtggttgttcccacatcgcaggaacaaccaccgtttgatttaaatcacatgggtactggcagtgataagtcggatgcgctcggcgtgccctattataatcaacacgctatgtagttattgtcaggctctgatcacagagcctgacatttccgtaatatcttcctgaagtctcatatattttcgccattgttggcgatgagatcccgataccagtaaaacgatgctttacgtatccgttccagcgttcccttcccttcgttgtctttatcgacataaatcattccgtagcgttttttcatttctcctgttccggcagaaaccaggtcaatgcaaccccacggggtgtagccaattaagtcaacaccatcttcaactacggcttttttcatttcccgaatatgggaggaaaagtaatcaatgcgatagtgatcgttcaccgtgccgtcagcttgtctctggtcaaccgcaccaaatccattttcgacaataaacagcggcaactggaaatgatcccagaaccagttgagtgaataacgtagccctgccggatcaatttgccatccccattcggatgtatcgatataagggttgctgaccaaatctcgtggttcaacataatccagttgcggattatctggcgaaaattgcgtcgtaaaagacatgtagtagctaaagccgataaagtcgacacaacctctggcaagaatcgcgttatcatctggtgtgatatcgaggttgaatcctttccttgcaaagtaattcagcatatgttgcggataatatccacgagcatgaacatcagtaaaccagtaacgacgatgcatcgctttcgtggccatcatcatatcgttgggtgcacacgtcagaggatagatggggcacatagcaatcatacagccgatattaaattcaggattgatcagttttccagtctgtaccgccagggcactggcaactaactcataatgtaccgcctggtacattatttgttcgcgctcattgagatcttcctctggcgaatacaagataccggaattagtaaatggacacaggctttcgctgaaattcacctgattattgatttcgttaaacgtcatccagtactttactttttctttatagcgcgtgaagaccgttgatgcgaagtggataaaaaagtcgatcagtttacggtttcgccagccaccatattttgtcaccagatgataaggcatctcaaaatgcgaaagcgtcaccacaggttccattccctgcttcaggcattcatcgaagagatcatcataaaattgtaaaccctcttcattcggctcctgttcgtcaccttgcggaaagattcgtgtccaggcaatggaagttcgaaagcatttgaatcccatcccggcaaataactgaatatctgttttatagcgatgataaaaatcaattgcttcatgattgggataattaagtccgtcgataacgccttctgtcacttcacgcggcaccccgtgagcgccagcagtcattacatcagcgatactgatgccttttcctccttcattccagccaccttccaattgatgtgcggctaccgcaccgccccataaaaaatcttttttaaatcctgacatacacaactccttaactaaaatagattaccaccagacttccacctggatgccggccataaactcgtttttgctgttctcattaaacttaaaattcgataattcgttatccagaatattgatatacgtcccgtagaagcgaatttctggtcgtgaacctaaaatactttcacccactttcaatgcatgccagagtgtcgttttataagccgattcatttagcgttaccccctgctgagttttgttctgttgcttaaaccagcctaattcaagccccgtctgattccatgtattccagatccaggccggtcttattacggtgcgaatactgtcaaaatcactatgagcgccactttcataactataaacatcttcgccatgagaatagacaagcgcgttagccataataatattgtcagtcagatacatctcgccctgagagattaaacgccaggcgatcccattggtatggtcaccatagtaatagcgaccatgcgccatcgtattactggcatctgagaaactggcaaaactgctggcataggaattattggcaacctgtaacgtaaattcattaaacgtatcgcgttgcaagttttgccgtaaaacagaagtcagcatccagctatctttcatttcaaaataactgtcgtcattttcattatcttgttgttgatccgttttattaggtgcggaatatttagccattaatgacaacgtcgcatcatcccataacgggatattgcgataacgaacatccacagaattggtattcatctgactggtacgcgtaaaatcacgagagtaaacatcgacatcatctcggcttaaggacatatcaaacagccctacaccaagcgcccagttttcaatccccacacccgcggcaacatccgtggttaaggttttccagtccagcatttggatctcatattgcgggagtttatgtttgccgacccagaagtctgcctctcgtgcgaagggtaaaaaacctcgcgttgtcagataaatatcactgaactgcatgatattttcattggcactgtcaccaaaccaggcatcgttatactgctgacctacgtttccatcataggtaacgaccgcatttgccgttctaccgtcctgattataaacacgctgatttaaggtcaggtcaaaccaaccactcatctcgttaccaaaacgtcccagagaacccgctgcataagtttgtggtgagccgtgattaccggtgccccagcctgagcggaagtacccctgatagctgaatccaatatcatcctttatatatttactgatatctttcagggtcacgctttcgatagtggttttatcgcctttactttcaataacggcaatttgctgcgatccatttatagtatgtgctgcggcagacgagttctgttcaccgttttcatttttgatgttatcagcaacgggagatgtcgctgatatttcggcaagcgaggccgattgatatttattttctgtgatgcttttttgtaatgtcgaaagtcggaatttatatactcccagttcattctgtgttgctttcagctcttgtttattttgcgacaattcattttcaagcaattcaaggcgctgctctatggttaattttgttgccatcgcgttcaacggaaacaatgctgtaataatagaaatagacaaaaggctgacgttaagcgtctttatattcataacttatccttaagagtgtagtaatttcctccagatatcgcactggagaaaaaatcaggcatggagctcttttcttaatgaaataatttccctggctaaatcctggcataatattgcattcatcaaatgatcctgtgcatgtatcagaattaaattaacttctattttgccacagccttcatcctgactaattaacgcggtctgaatcttatgcgcctgaagacaggcagattcagagctggccattagtttagttgcgccctgccagtctttttgcccggcacaacgtatggcttccatcgcatcagaacgagcctgtcccgcgttgatcagtaactccataacaagttcttcatctgcaaacatcacaatctccttcctgggtaaatggaattatccgttagttgtcatgttattgactttgttggcggcgataacaaaaggtaaatagatcattgtcgccacacctaaacataaaaaaccaaccagtaatgccagccagtttcccccggttccgaggaaagcaattaaaggtccgggcgtagtccagggcacggcataagcaaccggtggaataatttccatcgaaacaaagaagtaaccaatggcacagttaacaatgggaaccataataaacggcaccatcatgatggggttaagtacaataggaaggccgaacattatcggttcattgatattgaaaataccggggataaatgacatttttgccagatcacggtattccgcacgcttagaagcgataaaaatagccaacaataaccccaacgtcatacctgaaccgccgcagttggcgaatgcatcattaatagaagtccaggtaatcggatatggcgcgccccaggtagtgccgtgttgagcggcccaggagagattctccagattagcctcagaaaaaacggtttctcgaattgccgacgttgtattaggtccgtggatccccagcacccagaggaaattacccacagcccccaggataattaccgcaaagatattcgttcccatatgtttgagcggcgtctggattaatgtgtaaatgagatcatttaatcctgccggggatatcaatgtcaggcaataattaagtgcggaaaagaacaccatgacaaaaaatattggcaataaaactttaaatgaacgcgctaccgcaggaggtacagctgccggcatcgttatggtgattttggggtttcgagctaagcgacaaaatatttcactggtgatcaatgcaacgataacagcaacaaacaacccctgcgcgccgagatatttggtcgtcaggaatgcctgcccatctatcatctggtatggggtataaacaataaaaaatgctcctattgccgttaatccgcataaaagatcatcttgctcatagctaatcgccacattcctggcgaccaggaaagcaatcataattgacatgatatttacagaaccattcattaccggagtaaaaatagcttgtgctttttcaaggttggggaaaatgctgttcagatgcagtaatccggcaataaaaccgtcgggcgataatatggcaaagttaattaatataattaatgagcttgccatgataattggaaacgtaaaaacgaatccatctctcaccgctgcaacatgtttttgtgagtttaacttgatagcaactggaacaagaaaacgttccattccacgttcgaatgatgccattaatcccatttttttatacctgttgtcctggatatttatacatcccaataaagcatgtatgccatatccattttatgatgtgtgaaaagttagttcaggtaatagtttaataatattagattcttactcttgcagtagtttcatcgcaaattcaagaactgcctgtccgttcattgtgccatagtctttcatctcgataacggctacaggcattttcccctgtgcaacggcttcaatctctggtttctgaaagcgaacttgcggaccaagtaaaacaacgtcaacttcgttatttttaattttccctttagcctctgcaatcgccaatgcggaaatattaacttcaagtgaaatagcggtagcatgatcaatcatacgtttaaccagcatactggttgacatgcccgcagcgcaaactaacaatatctttttcatatttttccttactggtatataacagactacattgtgtaaatatcatatcccacagtagctacacgtcctggtacattgatcacagtaatacagcaataaagttgttcaacaacagggtgataattaaacgactcggccatacgataaactaatcaggtctcaactccttgttttcaatggctcttaaaaggtgcaaaagtgatttttcaaaagattgcccgcttacttaaatccgagatcaatggcaattcatggcatgttggtgatttgttgccgtcagaagcggaactcgctgttcgttataatgtttcgcgtaataccctgcgtaaggcattatccctgctggaaggcgaaggaattattcacagaaagcatggttcaggaacatacattcaaaaaaagaattttgttgcacacattgatcacatgaacagtttcagtgaaattgcacataaaagcggcaaagaggcaggaagtcagattatgaaatttgaagtgcaggatgcttctcctactattgcgactgagctgaatttagtgactggtgagcaggtttattacataaagagactgcgattcattgaggataatgcagcacaattagaagaaacgtggatgtcagtggcacgttttcctgatttaaccgtatcgcatatgcaaaaatccaaattttcgtatattgagaacgaatgcgggatcaaaatcattggcacctttgaaactttctccccgacttttcctacccctgaaatcgccagtattttacggatcagcccacgggatcccatacttaaaattcagacccaggctgtggatagtaactctattccgctggattattcgttactttacagcaatattttcgagttccaggtaaagtactttttcccgcgataaaagcagacgcacagagtgctggcatcacattctgtgcgtatggtttagcctctgacctttaccgctttacgccaccgcaagccaaatacattgatatacagcccggtcataatgagcaccgcaccgaaaaattgcagacccgttaagcgttcatccaacaatagtgccgcacttgccagtccaactacaggcaccagtaacgataacggtgcaacccgccaggtttcatagcgtcccagtaacgtcccccagatcccataaccaacaattgtcgccacaaatgccagatacatcagagacaagatggtggtcatatcgatagtaaccagactgtgaatcatggttgcggaaccatcgagaatcagcgaggcaacaaagaagggaatgattgggattaatgcgctccagattaccagcgacatcaccgccggacgcgttgcgtgcgacatgatctttttattgaagatgttgccacacgcccaactaaatgctgccgccagggtcaacataaagccgagcatcgccacatgctgaccgttcagactatcttcgattaacaccagtacgccaaaaatcgctaaggcgatccccgccaattgtttgccatgtagtcgttcaccgaaagtaaacgcgccaagcacgatagtaaaaaacgcttgtgcctgtaacaccaacgaggccagtccagcaggcataccaaagttaatagcgcagaacagaaaggcaaactgcgcaaaactgatggttaatccataccccagcagcaaattcagtggtactttcggtcgtgcgacaaaaaagatggccgggaaagcaaccagcataaagcgcaaaccggccagcatcagcggtggcatgttatgaagccccactttgatgaccacaaaatttagcccccatacaaccactaccagtagcgccaacaccccatcttttcgcgacattctaccgcctctgaatttcatcttttgtaagcaatcaacttagctgaatttacttttctttaacagttgattcgttagtcaccgtttacgacggcattaatgcgcaaataagtcgctatacttcggatttttgccatgctattcctttacatctctaaaacaaaacataacgaaacgcactgccggacagacaaatgaacttatccctacgacgctctaccagcgcccttcttgcctcgtcgttgttattaaccatcggacgcggcgctacgctgccgtttatgaccatttacttgagtcgccagtacagcctgagtgtcgatctaatcggttatgcgatgacaattgcgctcactattggcgtcgtttttagcctcggttttggtatcctggcggataagttcgacaagaaacgctatatgttaatggcaattaccgccttcgctagcggttttattgccattcctttagtgaataacgtgacgctggtggtgctcttttttgcccttattaactgcgcctactccgtttttgctaccgtgctgaaagcctggtttgccgacaatctttcgtccaccagcaaaacgaagattttctcaatcaactacaccatgctcaacattggctggaccatcggtccgccactcggcacgctgttggtgatgcagagcatcaatctgcccttctggctggcagctatctgttccgcgttccccatgcttttcattcaaatttgggtaaagcgcagcgagaaaatcatcgccacggaaacaggcagtgtctggtcgccgaaagttttattacaagataaagcactgttgtggtttacctgctctggctttctggcttcttttgttagcggcgcatttgcttcatgcatttcacaatatgtgatggtgattgctgatggtgattttgccgaaaaggtggtcgcggttgttcttccggtgaatgctgccatggtggttacgttgcaatattccgtgggccgccgccttaacccggctaacatccgcgcgctgatgacagcaggcaccctctgtttcgtcatcgggctggtcggttttattttttccggcaacagcctgctattgtggggtatgtcagctgcggtatttactgtcggtgaaatcatttatgcgccgggcgagtatatgttgattgaccatattgcgccgccaggaatgaaagccagctatttttccgcccagtctttaggctggcttggtgctgcgattaacccattagtgagtggcatagtacttaccagtctgccgcctttctcgctgtttatcatcttagcgttggtgatcgttgttgcgtgggtgctgatgttaaaaggaattcgtgcaagaccgtgggggcagcccgcgctttgttgatttaagtcgaacacaataagaatttaattcagccttcgtttaggttacctctgctaatatctttctcattgagatgaaaattaaggtaagcgaggaaacacaccacaccataaacggaggcaaataatgctgggtaatatgaatgtttttatggccgtactgggaataattttattttctgggtttctggccgcgtatttcagccacaaatgggatgactaatgaacggagataatccctcacctaaccggccccttgttacagttgtgtacaaggggcctgatttttatgacggcgaaaaaaaaaccgccagtaaaccggcggtgaatgcttgcatggatagatttgtgttttgcttttacgctaacaggcattttcctgcactgataacggatcgttgacacagtagcatcagttttctcaatgaatgttaaacggagcttaaactcggttaatcacattttgttcgtcaataaacatgcagcgattccttccggtttgcttaccctcatacattgccctgtccgctcttccaatgaccacatccagaggctcttcaggaaatgcacgactcacaccagcagtcacggtaatgttgatatgcccttcagaatgtgtgatggcatggttatcgactaactggcaaattctgacacctgcacgacatgcttcttcatcattagtcgctttgacaataatgataaattcttcgcccccgtagcgataaaccgtttcgtaatcgcgcgtccaactggctaagtaagttgcgagggtgcgtaatactacatcgccgattaaatgcccgtaggtatcattaaccaatttaaatcggtctatatccaacaacattaaataaagattcagaggttcagcattgcgtaactgatgatcgaaggattcatcaagaacccgacgacccggcaatcccgtcagaacatccatactgctacggatcgtcagcaaataaattttgtaatcggttaatgccgcagtaaaagaaagcaacccttcctgaaaagcgtcgaaatgcgcgtcctgccagtgattttcaacaatagccagcattaattccctaccacagttatgcatatgttgatgggcagaatccattagccgaacgtaaggtaattcatcgttatcgagtggccccagatgatcaatccaccgaccaaactggcacagcccataagaatggttatccgttatttctggcttactggcatctctcgcgaccacgctgtgaaacatacttaccagccactggtagtgggcatcgatagccttattgagatttaacaagatggcatcaatttccgttgtcttcttgatcattgccactcctttttcacagttccttgtgcgcgctattctaacgagagaaaagcaaaattacgtcaatattttcatagaaatccggagttatgagcatctctgagataacattgtgatttaaaacaaaatcagcagataaaaaagtgtttaattctataaattaactctgcattatcgcaattaaaaggatgacaaatagcataacccaataccctaatggcccagtagttcaggccatcaggctaatttatttttatttctgcaactgagtgacccgaacgacggccggcgcgcttttcttatccagactgccgctaatgttgatcatctggtccggctgaatttgaaaattattataacggaagagtatacaaaaaaagtaattttgctggcgactgcgaaacggcattcgcattagcggtgaagtttgccctcgcccagttgctgcaattactgctataacgaagctggtctggcgataaatccaggccagccattggtggtgtttatacgttcaagccacgatgttgcagcatcggcataatctgaggtgccttaccgcgccattgtcgatacaggcgttccagatcttcgctgttacctctggaaagaatcgcctcgcgaaaacgccgcccattttcacgcgttaatccgccctgctcaacaaaccactggtaaccatcatcggccaacatttgcgtccacagataagcgtaataacctgcggcatatccgccaccaaaaatatgggcgaaataactgctgcgatagcgtggcggtatagcaggaagatccatattttccgccaccagcgcccacaattcgaaatcatcgacgtcctgcattgcttcgttttcttccaggcaatgccagcgcatatcgagaagtgcggcgctaagcagttcgctcatctcataccctttattgaacagactggcattacgcattttctgttgaagttcgtcaggcattgcggccccgctctgataatgccgggcgtagcgagcaaatacctgcggatgtgttgcccagtgttcgttgatttgcgacggaaattcgacaaaatcacgcggcgtgttggtgccggaaagcgtggcataacgctggcgggcaaaaaggccgtgcagcgtatgaccaaattcatggaataaggttattacatcatcccagagtaacaacgcaggctcaccggcagcgggtttctgataattgcagacgttataaattaccgggtgcgtttcattcagcgttgattgctcaacaaaattgcccatccatgcaccgccgctttttgaatcacgggcgaagaaatcaccgtaaaataacgccagccccacgccattatgatcaaaaatttcccacacacgaacgtcaggatggtagacaggaatatcaaaacgttcgacaaacttaataccgaagagctgattcgcagtccagaatacgccttcattcaacaccgtgtttaattcgaaataaggcttgagctgcgcttcatcgagatcgaatttctcacgtcttacctgctcggcataaaatgcccagtcccacgactgcgcgctaaacccgccctgctgcttatcgataatcgcctgtatcgaggctaattcatcgctcgcacgttgacgcgccgctggaacaatttcccgcataaagttgagcgctgcttctggcgtttttgccatctgatcggcgattttccatgcggcataatgaggaaaaccaagcagtttcgcctgctgcgcgcggatctccaccagacgttgaatgatagcgcgggtatcattggcatcatttttttccgctcgcgtccagcccgcagtaaacagtttttcacgcgtcgcgcgatcgcgcagttcagcaagcgctggttgctgggtggtattcagcagcggaatcagccagttgttatccagacctttctcgcgagccgcctctgccgccagcacaatctcttgttcactcattcctgccagctgcgcgatatcgttcacaaccagaccgccggatttatttgctgccagtaaccgctggttaaactggctggtcagggtcgcagcttctgtattcagtacttttaattttgctttatcagcttgctcaagtttggctccggcaaggacaaaacgttgatgaatcacctccaccaggcggatggattcactatcaagccccagggattcacggcgttgccagacagcatctacccgcgcgaataattccccgttcagatagatatcattcgcaagttccgccagttcagcggaaaactgttcatcaagacgctgtaattcatcattggtatgcgccgcagtcatcgcaaaaaagacgctggtaacgcgggtaagtaattctccgctttgttccagtgccagaatagtattgttgaaatcaggtgtttgcgggttaagcgcgatggcagctatttctgcccgcttttgctgtattccctcatcgaatgccgggcgatagtgatggttggcaatttgatcaaaatggggagccagatacggcagtgtgctttgcacaaggaaaggattcattgttgtcattttcttctcctgaacgcgaggtgttccatagcgtaggcttactgataacggagtgcaatcttgcaaaccagtattacccgctcttaagcatcacgtgctatgttattgacacacaaaagcgttgaggaacagtgagatgatcgttttagtaactggagcaacggcaggttttggtgaatgcattactcgtcgttttattcaacaagggcataaagttatcgctactggccgtcgccaggagcggttacaggagttaaaagacgaactgggagataatctgtatatcgcccaactggacgttcgcaaccgcgccgctattgaagagatgctggcatcgctccctgccgagtggagcaatattgatatcctggtaaacaatgccggcctggcgttgggcatggagcctgcgcataaagccagcattgaagactgggaaacgatgattgataccaacaacaaaggcctggtatatatgacgcgcgccgtcttaccgggtatggttgaacgtaatcatggtcatattattaacattggctcaacggcaggtagctggccgtatgccggtggtaacgtttacggtgcgacgaaagcgtttgttcgtcaatttagcctgaatctgcgtacggacctgcatggtacggcggtgcgcgtcaccgacatcgaaccgggtctggtgggtggcaccgagttttccaatgtccgctttaaaggcgatgacggtaaagcggaaaaaacctatcaaaataccgttgcattgacaccagaagatgtcagcgaagccgtctggtgggtgtcaacgctgcctgctcacgtcaatatcaataccctggaaatgatgccggttacccaaagctatgccggactgaatgtccaccgtcagtaatttttatacccggcgtaactgccgggttattgcttgtcacaaaaaagtggtagactcatgcagttaactcactcacaagcaagaacgaatgaccgtcgaaacgcaacttaatcccacaccgcctgtcaatcagcagatttatcgtattcttcgccgcgacattgtccattgcctgattgcaccaggcacaccgttgtcggaaaaagaagtttctgttcgtttcaatgtgtcacgccagccggttcgcgaagcctttattaaactggcggaaaacggtctgattcaaattcgtccgcagcgtggcagctacgtcaacaaaatttccatggcccaggtgcgcaacggcagttttatccgtcaggccattgagtgcgcggtggcgcgtcgggcggcgagcatgattaccgaaagccagtgctaccaactggaacaaaatcttcaccagcaacgcattgccattgagcgcaagcaactggatgatttttttgaacttgatgacaacttccatcaactcctgacgcagattgccgactgtcaactggcgtgggataccattgagaacctgaaagcgaccgttgatcgcgtgcgctatatgagcttcgaccacgtttctccaccagaaatgctgttacgccagcatcttgatattttctctgccctgcaaaaacgtgatggcgatgcggtagaacgtgcaatgacgcaacatttgcaggaaatcagcgaatccgtgcgccagatccgccaggaaaacagcgactggtttagcgaagagtaattcatttcctctcatcccatccggggtgagagtcttttcccccgacttatggctcatgcatgcatcaaaaaagatgtgagcttgatcaaaaacaaaaaatatttcactcgacaggagtatttatattgcgcccgttacgtgggcttcgactgtaaatcagaaaggagaaaacacctatgacgacctacgatcgtaaccgtaacgcaatcaccactggcagccgtgttatggttagcggcaccggtcacactggcaagatcctgtcgattgatactgaaggtctgaccgctgagcaaatccgccgcggaaaaaccgtagttgttgaaggttgtgaagagaaactggcaccactggacctgattcgtctcggcatgaactaagcgtgtgaatgccgccgatggcggcattgctttttttacttcacggaatatttcgccacggtcgctttcgcgccatgcgctaataaagacaagtacgcttccgttacttttgtcgtaaacaaactattgcctggtaaatcatcaccaaagatcgccttaattgccagcagtgactggacgcgcgctgtcccttcagcactactttgtactgccttctgaataacaggtaacagtggatcactgatttctatcggatttccctgttcatcaacaccaccgacataacgcatccaacctgcgacgcccagcgccagcagatcgaacttgctgtcatgcgccagatgccagcgaacagaatccaacatccgctgtggcaatttctggctgccatccatcgcaatctgccaggttcgatgacgtaacgccgggttgctatagcgttcaattaatcggttagcgtaatcttgcaaatcaacgccctgcactttcagcgtcggcgcttgttcctgcaacattaaggtatacgccgcatgacgataatgttcatcctccatgcagtcattaatgtgctgatatccggcaagatagcccagatacgccaggaatgaatgactgccgttaagcatacgcagtttcatttcttcataaggcagcacatcgctaaccagttcagctcccgctttttcccattccggacgtccggcaacaaagttatcttctattacccactggcggaaaggttcacaggcaacgcctgccgcatcgcgcacaccggtaagttgttcgattttcgccagcgtatcctctgtcactgcgggcacaatacggtccaccattgttgatgggaaagtcacgttatcttcgatccattgtgccagttttacatcaatggcttgcgcataggaagtgacaacgtcacgcataacatgaccgttttctggcatgttgtcacatgacatgacggtaaatgcgggaagtcctgccgctttacggcgagccagcgcctcaacaatcacccctgttgcagttttcggctggtggggattttgcacgtcggcaacgaccatcgggtgatcaagcattaactgtccggtcgccggagagtggaaataccctttttcggtgattgtcagagagacaatcgcgatttgcggttcacacatcgcagccaacacggtttctaagccatctatttgtacgtgcaaggcttttttaacgacgccaacgacgcgagccgtccacgcatcagccgacatttccgcaacggtataaagattatcttgctgttgtaaatcggcaatttgctgttcgccgccgattaagttgacctcataatatccccagtcactgaaatgttccgtagcaagaatatcggcatacacgccctgatgcgcacggtgaaatgcaccaaagcctaaatgaacaattcttggggccaggttattacgatcataaacagggagcgtcgcttttgctgataacaaatgatttcccataacaattccttaaaattaaatatagcaagctacatgttttgttatatgaataaaaatcccctctccggtaagagaagggattgaggatttacagacttctggacggttgcgcagctcttacaacatgtggttgatcttctgcggcgtcttccagcgcacttaaatcacggtctttcacttctggcattttcagcgcagagattaaaccaatcacagaatatgccatgatcataatggcgatcggataccaggattccgtcatggtgcagaaaatccccgccaggataggaccaaaaccggaagcgataagaccaccaatttctttagaaatagccattcgggtaaagcggtttttacagccgaacatttctgccatggtaatgttttccagagcaaataatcccagcaccgcacagttatgaatcacaatcagtgcaaccataatggtgctcggggcatagcttttatctacgatgatagaaagcattggccacgccagcacaatcgcagaggtattcataataatatacgggatccggcgaccaattttatcggataaccaaccaaggaacggaatggtcataaagccgagaatcgaactgatcatcaatgcatctgttggaattgctttgttaaacaataacgtctgcactaaatagcctgcaaggaaagtctgaattaaacctgagttaccagcctgaccaaaacgcagccctgttgccagccagaaggatttgctctggaacatgctaccagcaggtgcaggttttgctgtcggttggttgctgtcgttaaccttctcaaagaccgggctttctttcagattcatacgcaaccagatagcaaagaccatcacgacaacgctcgccaggaaaggtatacgccatccccacgccagcagttcctctttactgagaatgaagaacataaaggcccagattgccgttgcgctcaaggttccgcagttagttcccatagccacaaatgaggagataattccgcgcttaccttttggcgcatattccgccagcatcgtaccggcaccggaaatttccgcacctgcacccaacccctgaataatacgcagcgtcaccagcaagatgggggcaaaaacaccaatttgtgcataagtcggtaacacaccaattaaggtggtacagatccccatcatggtgatggtaataaagagcacttttttacgccctattctgtcgcccattttgccgaaaataaatgctccgacaatacgtgccacataacctgcaccataggttcccattgccagaattaacgccattgccgttgatgattcaggaaaaaatatttcatgaaacactaacgctgcgccgagcgaatataactggaagtccataaattcaagcgcagtgcccaaccatcccgatactgctgctttcaccaaatccttagtacttctttcgtgtttttctattgtcataatggttatctctaaaaaagaggtaagatgcgtactacttactcgccgttattggtattattcagaaaaagtgagtaagactttgcagcaatgtttttgatccagttcaaataaactaatggcatccgcaacatgctggaaatcaaatgtatgggtaattagtttttctggtttaattaaccctttacttaaccagtcgataacgaccgggaatttatttgcatttaagcgtgaagagaaaatagagagttcttttccggtaattccttgctgaatcacttcagacggttcactggagaagcccatcaatacaatacgtgccgctggagaagccagcgttacggcctctttcaagattgaaggatgacaagcggcatcgataattaaagtcggcttgatgcctttttcagcgaaactctcgccaagcggtgtctggctgttattaatcgcccagtctgccccgctctctttcgctttttccagtcgttcatcaatgcgatcggcaacaatcacatttttaacgttatagacgccttttaatacctgaacgatcgtcaggccgattgggccggcaccgtaaaccagaacggtatcattttcagtcggttgaccatgaccggtaacgttagccgcaatggtaaaaggttcgatcatcaccgcatattgatcggccacagcttcaggaattttccacgcattttttgccggaaccacagcatattcactgaaaccaccgtcagcgtgcacacctaatacagcaagtgtcgtacaaacgttcggcttacctatagagcacggatagcaatgcccacagctgaccaccggatcgacagcaacgcgttcaccgactctggcgctttccacgccttcacccactgcatcaatgacgccaaagaattcatgaccaatgacgcgcggatatttcgcaaaaggattatgcccacggtaaatatggctatctgaaccacaaattccggcaagtttcacttttactcgtacttcacccgctgacggggtgggtatttcacgttcgataatcgacagttgattcggtttttcaattaaaatgcttttcattaccttactccttaccagttccacagcgtgccatcttccagacgtgcgactggcagataagcaggttcatagggatatttcgccgccagcttttcatcgaattcgatgccaagacccggtttttctcccggatgcatatagccgttatcgaaagtccagttgtgcgggaagacttcgagcatttgttcggaataacccatgtattcctggacaccgaaattggggacccacagatcaaagtgcagcgccgcagccatgcagactggtgacaaatcggaaggaccgtgtgagccagtacgtacctgatacagcgaagcaaaatcggcaatccgacgcataccggtaattccgcctgcatgggtcagcgtggtgcggatataatcgatgagttgctcttcaatcagttgtttgcagtcccaaatgctgttgaagacttcacccaccgcgatgggtgtgacggtatgttggcgaatgagacggaagcattcctggttttccgcaggcgtcgggtcttccatccagaacatgcgataatcttcaatgctcttaccaaagcgcgccgcttcaataggcgttaagcgatggtgcatgtcatgcagcagatgttcatcaaaaccaaacttgttacgtaccgcgtcaaacaatttcggcatgaaatcgaggtatttctccgtcgaccacagctgctcttccggccactgtcctttggttgcgggttcataagccagacctttacctttcgacatgccgtaggtggttttcataccagggattccgcactgcacgcggatggctttgaatcccagctcctgatgacgggcataatcatccagagcttcatcaatactgtgaccggtggtatggcaataaaccatcaccccttcacgagacgcgccgccgagtaactggtaaagcggcatgttggcagctttggctttaatatcccacagcgccatatcaaccgctgaaatggccgacatcgtaaccggaccgcgacgccagtaagcacctttatagaaaaactgccagatatcttcgatacggtgtgcatcgcgaccaataagctgcggacaaaggtgatcctgcaaataagaggccacggaaagctcacgtccatttagggtggcatccccaaggcccgtaataccgtcctcagtggtgatttttaatgtgacgaaattacgccccggacaggtaacaaaaacttcagcctttacgatcttcatgttcgattccttgcatcgcttgtcgtgatgcatgaaatctacgcaactgagctactaccatacaagtatgaagatcaaaaaaagccggagtgatcacaaaaaaaggcgtatatttgcgccgtgaatggttgacaaaagatgaaacagaataccttttgtcagctgacacttcctcgtatcttattgataaaatggatttatgttcctacgtgcgcccccagcccgcaacaatgatcaacatgccgcaaagcgcaattaacgcccccgtccagtcataaagagtcagtttcacgccatccacaacgcgcagccaaatcaacgccgtgcagacataaacgccaccataagccgcgtaaacacgcccactcgccgcaggatgcaacgttaacaaccagacaaacagcgccagtgaaatccccgccggaagcaacagccagatactggcgtttcgcttcaaccacagccagggcaaaaagcatccaataatttcacacagcgcagtagcaaaaaatagtaacgttgttttaatcatctttgtcacttattgacatcacgtatagttatagggcgacataatatcatcaatataaacaccctccttgaacgttttgcgttcgcagtggatggtgtagaatcagctttaatcattcatacagggaatgaattatgaaaatcactctcagcaaacgaatcggcctgctcgcttttctgctgccttgcgcactggcattgagcacaactgttcatgccgaaactaacaaactggtgattgagtctggcgacagtgcacaaagccgccagcgcgccgctatggaaaaagagcaatggaatgacacgcgtaatctgcgccagaaagtgaataaacgcactgaaaaagagtgggataaagccgacgctgcttttgataaccgcgataaatgtgagcaaagcgccaacatcaatgcctactgggagccaaatactttgcgctgcctggaccgtcgaactggccgcgttattatcccctaacctgttattgatttaaggaatgtaaggacacgttatgccaagcgcccacagtgttaagctacgcccgctggagcgtgaagatttacgctatgtacatcaactcgacaataacgccagtgtgatgcgttactggtttgaggaaccctacgaagcctttgttgaactctctgatctgtatgataagcatattcacgatcagagcgaacggcgctttgtggtggaatgtgacggcgaaaaagccggtctggtggagctggtggaaattaaccatgttcatcgccgcgcagaatttcagataattatctccccggagtatcaggggaaaggtctggcaacccgtgccgccaaattagcaatggactatggcttcaccgttctcaatctctataagctgtatctgatcgttgataaagagaatgaaaaagcgattcacatttaccgcaagcttggctttacggttgaaggtgaattgatgcatgagttctttattaatggtcaatatcgtaatgccattcgcatgtgtatattccagcatcagtatctggctgagcacaaaacaccgggtcagactctcctgaagccgaccgcacaatagtattaataataatcgatcgtatttttgatggtgtaaacccgttcgacggcgggttttactccttcatcaacaatgattagctgacagtccaccggattggcgtgattgtcatattcacagctctgttttacatttccaacccgttgattattcagtaaagtaaccgctgtgtaatctaattttttgatcgggtccgttgatggcgtggcgctgacagataatgttttatcgttacttttcgtggttttacccagcggatacccctgatcatcatagcgatattccatctgcatctgtttgctgctggctttaatcacgaaaccattatcatcggtttcccaactcaccccggcagaaggtaattctgctagctggcattttccctgcaaacgaactcttttctccagcgtctcggcatcacggtaataattggcgtccagtaccagggcaaccacggtattattttccagatccagtaattcgagagaatcaaaacagccttcttccgacaaagtccccgaaacacgtttcgtcacttcaccttgctcatccattaatgtctgagtgaaatcttttacgggaccacgcagcggatcaaaatcgaattcattagagaaactggccatctccggggtaaatgaaagtgttacctctgtgcggtcacatcctgtgagtaatatcgcgagtaagcatggcagtaatttgtatttcacaacagtcacctgagagtagagatgattctcaatcatagtagcaaatacagtactttacacgttaaatgctatgcttaaagaagttatcttcgcgtaaggagcttatgatgaaactctcaacctgctgtgccgcgcttctgctcgccctcgcctcacccgcggtactcgccgcgccgggatcctgtgagcgcatacagagcgatatatcacagcgcattatcaataatggcgtacccgaaagcagcttcacgttaagtattgtacccaatgaccaggttgatcagcctgattcccaggtcgtcgggcattgcgctaatgatacgcataaaattctctacacccgtaccaccagcggtaacgtctctgctcccgcgcagtctacccaggataacgcgcctgctgaaccgcagtaacacattatcgactgaacgccggatacgacacatccggcgatttgaacatacaacataatcccaccttattactcatacccttctattgatatggattaataattattaaccccaaatgggtagactctctctattgttagcgcgctaaatattcaatatataaacatttatataacgataaagaacagggagtgagttatgtccaaaaatgaacaaatggtgggcatcagccgcagaacactcgttaaatctaccgcgataggttctctggcgctggctgcaggcggtttttctttgccgtttaccctgcgcagtgcagaagcagcggtacaacaggccaacgaaaaagtggtctggggtgcctgttccgtcaactgtggtagccgctgtgcacttcgtctgcatgttaaagataatgaagtgacctgggtggaaactgacaacaccggcagcgacgagtatggcaaccatcaggtacgcgcctgtttgcgcggtcgctccatccgtcggcgtattaatcatcccgatcgcctgaattacccaatgaaacgcgtgggcaaacgcggcgaaggcaaattcgaacggattagctgggatgaagccctggatactatcgccagtagcctgaaaaaaaccgtcaaacaatatggcaatgaggctgtatatattcagtactcttcggggattgttggcggcaatatgacccgctcttctccatcagcctcggcggtcaaacgcctgatgaactgctacggcggttcactaaatcagtatggctcctacagcactgcgcaaatttcctgtgccatgccctacacctacggcagtaatgatggcaacagcaccacggatattgaaaacagcaagctggtcgtgatgtttggtaacaacccggctgaaacccgcatgagcggcggtggcatcacttatcttcttgaaaaagcacgcgagaaatcgaacgcaaaaatgattgttatcgatccgcgatataccgatacggctgctggtcgtgaagatgaatggcttcctattcgcccgggcaccgatgccgcgctggttgcgggtattgcttgggtattgattaacgaaaatctcgttgatcaaccttttctcgataaatactgcgtcggctatgacgaaaaaaccttacccgcagatgcacccaaaaatggtcactataaagcctatattcttggtgaaggcgatgataaaacagcgaaaacgccgcagtgggcttcgcaaattacaggtatcccggtagaccgtatcatcaaactggcgcgtgaaattggcacagcaaaacccgcttatatctgccagggctgggggccgcaacgccaggcaaacggcgagctgacggcacgcgctattgctatgttgcctattttgacgggcaatgtcggcatcagcggcggaaatagtggtgcgcgtgaatcgacctacaccattaccatcgaacgcttgccggtgctggataatccggtcaaaacgtcaatctcctgcttcagctggacagatgctatcgatcatggcccgcaaatgacggcaatccgcgacggcgtccggggcaaagataaactagatgtgcccattaagttcatctggaactacgcgggaaataccctggttaatcagcattctgacatcaacaaaacgcatgaaattctgcaggacgaatcgaaatgcgaaatgattgtggtcatcgaaaactttatgacctcatcggcaaaatatgccgacattctgctgccagacctgatgaccgttgagcaggaagatattattcctaacgactacgccggtaacatgggatatctcattttcctccagcctgtcaccagcgaaaaattcgaacgcaaaccaatttactggatcctgagtgaagtcgcgaaacgtcttggacctgacgtctatcaaaagttcactgaaggtcgcacgcaggaacaatggttacaacatctgtacgccaaaatgcttgccaaagatccggcgttaccgtcttacgacgaattaaaaaaaatgggtatctataagcgtaaagatcccaatggtcattttgtcgcctacaaagcatttcgtgacgaccccgaggcaaatccacttaaaacgccttccggtaagattgaaatttattccagcaagctggcggaaattgcccgtacctgggaactggaaaaagatgaagtgataagcccactgccggtttatgcctcaacctttgaaggctgggactcccctgaacgtagtgccttcccactgcaactgtttggtttccattacaaatcccgtacgcactcgacctacggcaacattgatgtcctgaaggcagcctgccgtcaggaagtgtggatcaaccctattgacgcacagaaacgtgggattgccaacggcgatatggtgcgggtgtttaaccatcgtggcgaagttcggctaccagccaaagtgacaccacgcattctccctggggttagcgctatgggccagggagcctggcacgaggccaatatgtctggcgataaaatcgaccacggcggctgtgtgaatacgctaaccactctgcgcccttcaccactggcgaagggaaacccgcagcacactaatctggtcgagatcgaaaaaatataacccactacaaccataaattctggcatgacattttgtttgaaaagcaataagtgagtaatgatgaaaatccataccacagaggcgctcatgaaggctgaaatcagccgtagaagtctgatgaaaacctccgcacttggcagtctcgcgctggcaagcagtgctttcactttgccgttttcccaaatggtccgagcggcacaggcaccggtagaagagaaagcggtctggagttcctgcaccgttaactgcgggagccgctgtctgttacgtttgcatgtgaaagatgacaccgtgtactgggtggagtctgatacgacaggtgacgacgtctacggtaatcatcaggttcgagcgtgtttacgcgggcgctctatccgtcgacggatgaatcatcctgataggttgaaatatcccatgaagcgcgtcggcaagcgcggtgaaggtaaatttgaacggataagttgggatgaagccctggataccatcagtgataatcttcggcggatcctaaaagattacggcaatgaggctgtacatgtcctgtacggaacaggcgtagatggcggaaacatcaccaactcgaacgtcccgtaccgtctgatgaactcttgcggtggttttctcagtcgctatggtagctacagtaccgcacagatcagtgccgcgatgagttatatgttcggtgccaatgatggcaacagcccggatgatatcgccaatacgaaactggtcgttatgttcggaaataacccggcagaaacgcggatgagcggcggtggtgtcacttactacgtcgagcaagcccgcgaacgttcaaatgcacgcatgatcgtcatcgatccacgttataacgacacagctgccggacgtgaagatgaatggctgcccattcgccctggcaccgatggcgcactggcctgtgcgattgcctgggtactgattactgaaaacatggtcgatcagccatttctcgacaaatattgtgttggttacgatgagaaaacgctgcccgccaacgcaccacgtaacgcgcattataaagcctatattctgggcgaagggcctgacggcatagctaaaacgccggaatgggcagcaaaaatcaccagcataccggcagaaaaaattatccagttggcacgagagatcggttcagcaaaacctgcttatatttgtcagggttgggggccacaacgacactccaacggcgaacaaacgtcccgcgctattgccatgctttccgttctcaccggtaacgtcggcataaacggcggcaactcaggtgtacgcgaaggtagctgggatctgggggtagaatggttaccgatgctcgagaatcctgttaaaacgcagatttccgtctttacatggacagatgctatcgaccatggtacggaaatgaccgcgccccgtgatggtgttcgtggaaaagaaaaactggatgtccccatcaagtttttatggtgctacgccagtaacacattgatcaatcaacatggcgacatcaatcacacccatgaggtgcttcaggatgacagcaagtgcgagatgattgttggcattgaccacttcatgactgcctcggctaagtattgcgatatcctgttacccgacctgatgccaacagagcaagaagacctcatctctcatgagtctgccgggaatatgggctatgtgatcctcgcccaacccgcaacctcagcaaaatttgaacgcaaacccatctactggatgctgagtgaagtcgccaaacgcttaggaccagacgtttatcaaacctttactgaaggtcgcagtcagcatgaatggatcaaatatctccatgcgaaaacgaaggaacgtaaccctgagatgcccgactacgaggagatgaaaacgaccgggatctttaagaaaaaatgcccggaagaacactacgtcgctttccgcgcattccgtgtagatccacaggcaaacccattgaaaacaccttcgggaaaaatcgaaatttattctgaacgactggcgaagattgcggatacctgggaattgaaaaaagatgaaattattcatcctcttccagcttatacgccaggttttgatggctgggacgatcccctgcggaaaacttatccactgcagttaacgggcttccactacaaagcgcgtacccactccagttacggcaatattgatgtattacagcaggcctgcccacaagaggtgtggatcaaccccattgatgctcaggcacgcggtatccgtcatggcgataccgtgcgggtatttaacaataatggagaaatgctgattgccgcaaaagtgactccgcgtattctgcctggcgttaccgccatcgggcaaggtgcttggcttaaagcggatatgtttggtgaccgggtcgatcacggcggcagtatcaatattctgacctctcaccgcccttcaccgctggcaaagggaaacccgtcgcacagcaatcttgtccagatcgaaaaggtttaaggagtagcccatgaccacacaatatggattttttatcgattccagccgctgtactggctgtaaaacctgcgaactggcgtgcaaagattttaaagatcttggcccggaagtcagtttccgccgtatttatgaatatgctggcggcgactggcaggaagataatggcgtctggcaccagaacgtgttcgcttattatctctccatctcctgtaaccattgcgatgaccccgcatgtacaaaagtctgccccagcggtgcaatgcataagcgtgaagatggtttcgtggtggttgatgaagatgtttgtatcggctgccgctactgccacatggcttgtccgtacggcgcgccacagtacaatgctgaaaaagggcacatgacgaagtgcgatggttgttattcgcgcgtcgccgaggggaaacaacccatatgtgtcgaatcctgcccactgcgtgcacttgagttcggtccaattgaagaattgcgccagaagcacggcactctggctgccgtcgcgccactgccgcgcgcgcatttcacaaaacccaatatcgttatcaaacctaacgccaacagccgcccgaccggcgataccactggttatctggctaatccggaggaagtgtaaaatgggaaatggatggcatgaatggccactggttatctttaccgtattgggtcaatgcgtagtaggcgcgctgattgttagcggaattggctggttcgccgccaaaaataacgcagaccgtcagcacattattcgtggcatgtttttcctctggctgttgatgggcatcgggtttattgcctctgtcatgcacctgggatcgccactgcgggcgtttaactcgctgaatagaatcggagcttctggtctgagtaacgagattgctgccggttccatattttttgccgttggcggattatggtggctggtggcggtcatcggtaaaatgccgcaagcgttggggaaactctggttacttgtcagcatggcgctcggcatcattttcgtctggatgatgacctgcgtgtatcaaatcgacactgtgccaacctggcataacggttacactacgctggctttcttcctgacggtattgttgagcggtccaatacttgctgccacaattctacgtgcagcccgcgttacatttaataccacaccatttgccatcattagcattctggcgctgatcgcttgtgccgggttgattgtgctgcaaggtttgtctctggcgtctattcactcatccgtacaacaagccagcgcactggtaccagattacgcctccttacaggtctggcgtgtggtattgttatgcgcaggtctaggatgctggctttgtccgctcattcgtcgccgtgaacctcacgttgccggacttgttctggggttaatcctcattcttggcggtgagatgatcgggcgtgtgctcttttatggcctgcacatgacagtaggaatggctattgcaggttaacaaattggtgcggggcaacccgcacatttcaggatgttaggaatgacccatttttcacagcaagataatttttctgttgcggcgcgcgtgttgggcgcgctgttttattacgctccagagagtgcagaagccgcacctctggttgcggtactcacccgtgacggctgggaaactcagtggcctctaccagaagcgtcattagcgccgctggtgacggcttttcagacacagagtgaagagactcacgcccaggcctggcagcgtttgtttgtcggcccgtgggcactgccgtctccgccgtggggatcggtctggctggatcgcgaatctgtgctgtttggcgattcaacattggcacttcgtcagtggatgcgcgagaaaggcattcagttcgaaatgaagcaaaacgaaccggaagatcattttggttcactgctgctgatggctgcgtggttggcggagaatggtcgccagacagaatgcgaagaattgctggcatggcacctttttccgtggtcaacacgttttcttgacgtttttatcgaaaaagcagaacaccctttctaccgtgcactgggtgaactcgctcgcttaacgctggcgcaatggcaatcacaactgttgattcctgtcgcggttaaaccgctgtttcgataggatcaccgtattattgccggatggtgacgattacacgcaattcggcaattaataggttacagtgtcacgttttttatctcttaaagcacgcactgcttttgcggctggcctcttttgccgcaaaatagtcgcccgtgtttcattgcccatttctgctcatgcatcatctacacatctatccggatctgcgcactatgttccgccgtctgcttatcgcaacaatcgtcggtattcttgcggcctttgccgttgccgggtttcgtcatgcgatgctgctactggagtggctgttcctcaataatgactccggcagtctggtcaatgcagcgacaaatctttccccgtggcgacggctgctaaccccggcgctcggcggactggcggcgggtttgttgctgatgggctggcagaaatttacccagcaacgccctcatgcgccgaccgattacatggaagcgttgcaaaccgatggtcagtttgattacgcagcaagcctggttaaatcgcttgcctctctactggtagtaaccagcggcagtgcaattggtcgcgaaggtgcgatgattcttttagctgcccttgcagcctcgtgttttgcccaacgttttacgccacgccaggagtggaaattatggatcgcctgtggagctgcggcgggaatggctgcggcctatcgcgccccgcttgctggcagtttatttatagccgaagtgctgtttggcactatgatgttggcctctctcggcccggtgattatttccgccgtcgtggcgttgctgattagcaatcttattaatcatagcgacgcattactctacagcgtacaactctcagtgacggttcaggctcgtgactatgcgctgattatcagtacaggtgtgctggcaggtctgtgcggaccactgttgttaacgttaatgaacgcctgtcatcgtggatttgtgagtctcaagcttgcgccgccctggcaactggcactgggcgggttgatcgtgggtctgctttccctgttcacacctgcagtgtggggcaacggctatagcaccgtacaatcctttttaaccgctccgccactgttaatgatcattgccgggatcttcctctgtaaactgtgtgccgtgctggcgagtagtggttctggcgcgcccggtggtgtctttacaccgacgctatttatcggtcttgccattggcatgttgtatggtcgtagcctgggattatggttacctgatggcgaagaaattacgcttttactcggattgaccgggatggcgacactgttggcggcgaccacgcacgcgccgattatgtcgacgttgatgatatgtgaaatgaccggggagtatcagctactccccggtttattgattgcctgcgtaattgcgtcggtaatttcgcggacgttacaccgtgactctatctaccgccagcacactgcgaagcatagctaagcggatgtattgccccagttcacgctgttcggcgcgcggcagataaggcagttcaccaatgagcggtgccggaagttttttaccgagcacatcaatgatttccgcataatgcgccagtcctgggttgattcggttagccacccagccaatgagcggcagcccgtcgttggcaatcgcctgagctgttagcagtgcatggttaatgcaaccttcctgaataccgacaaccatcaacaccggcagttgttcctgcaccacccattcagagagcggacgcaaatcattcatcagactgcgccagccgccagtcccttctaccacgacatgatcgactttatcggtcaggtttgccaggccgtttgaaatgagggtgtaattgattgggcaactgtgcgccacgctactttcttcttcgcttaacgcgataggattaactgcttcataaggcagttcgatggttgaaacactctgcaacaccagggcatctttattacgcagcccttcgggtgtctctttgctccccttcgctacgggtttatatcccgcaaccgtttttccctgggaggctaacgcttgtagcaatgcgcgggaaaccaccgttttccctacagaagtgtctgtaccggtaataaagaaacgcttcagcatcactaactccaccgttatgcttcacaaatataaaccaggaaaataattaaccttgaaagtctaagttatgctttcctggcccaaattgagatagcgcaaattttggtagaacagttaaaaaatgttaaccctgcaacagacgaatcaacaaagaaccgttatacatcgcgtcttttaccagcgcagcgcctgccatcgtgccctggttagaaaactgagtactctcaacgctaatgtgctgactatacgcaggaagggcctgctgacggatgctgtccgagatgactgggaagaggatatctgccgctttacttaacggtgagccaatcagtattttttgtgggttaaataaattcaccatgatggcaagaatgcgaccgacatgcgcgcctaccccggtaatgatgtcttttgccagtagatcgccgcgcaatgccgcctgacacaatgagtccacggttaacggttgtccatgtaacatcgagctcatggattgattgagacgcagctgtgccagctcaagaatactgtccacactggcgatggtttcgaggcaaccgtgattcccgcaataacagcgtttcccatacgggtcgacctgtgtgtggcctatttccacgaggctactgctgcctgcgtgtagcagatgaccatcggtaatgacgccagcccccacgttgtgatcgataaccacctgaatcacatcgcgcgccccgcgtgaggcaccaaacaaggcctcagccatcgtccatgcgctgatatcatgctgaatataaaccggtacgccggtatgctgctccagcgcctcgccgagcggcatctcttttacatcctcgtagaacggcatgcgatgtacaataccattttccgtatcaataattcccggcaaggttatggcaatcgaagtcagacgctcaagttttttctggtggcggataaaaaactgatcgatatgggaaatgatacgctccagcaatggcgagtcatcttttaacgccagttcctgcgactcttccactaccagtttgctgctcagatcgcgcaaagcaaggaaaatctccccgcgactaatgcgcagagaaagatagtgccaggcttcagtttcaaccaccagccccactgccggacggccacggttccccgcttctttgatttccagctcttgcaccaggtgtgcttcgagcatctcacggacaattttagtgatactggcaggagccagttgcgccagacgggaaagatcgatacgcgagactggaccaagctgatcaatcaggcgataaaccgcgcccgcgttggtctgctttatttgatcaatgtgcccaggctgattttcagcaaccaccgcatactccctatattttcgcgctccgaaataatctgtaggctatggtgaagcacttcaatacgtgtcgtcaaatttttacttaggcatgtgattaacagcacatttttcgggctttttcgctgaaatttccctcacctgagagcattcagcagatgaatacgaaagttacgcgcagccggactttgttcatgatgtttcggccagaccaaccacatttcagaaaccgcatcctcttcagcaatcggcacccagcgcatttcgttgagctgaacacgtttaaatgacgcaggcaaaattgaaacacccagaccagcggaaaccagaccgatgatggtcattgcctcacccacctcctgagtgatgacgggcgtcaaattgtaacgtctcatcagcccgagaatatcgtcatacagccctgttccgacgtgcggatcaaaaaagacaaagggttctttcgccagttcagccagcgttacactcgggttatttgccaggggatgatcgtgcgggatcatcgccataagcggttcatggacgatgactgcgtgttcaagcgtctccggtaacgctgtgttacgcagcaatcccatatccagcgttccttcaatgagcggagcgatttgctcgcgagtgttcatttcgcgggtttgtaaatggacatcgggataatcacggcgaaacagcgataacgtatcggacaccgcccgaataaaaggagcggacgaagtaaaaccaatgcgcaactcccccgcttcgccctgatgcagcctttcagcgcgagcggcagcatcatccaccatagacaggatttgccgactatctacaagaaactgttttcctgcttccgtcagcaatacactgcgattggtccgtgccagcagtcgggcaccaatttgttgctccagcgcctgaatctgctgacttagcggtggttgcgaaatattcaggcgggcagcggcacgcccgaaatgcagctcttctgcaacagcgacaaagtaacgcagatgacgaagttcaagattcatatttaaaacatcttatttgagattattaatatattagacagaacaattcgattttcctaatctattcataagcctgatccacaggcatatttagcaaggatttcaagtgagccgtactacaactgttgatggcgctccggcaagcgacactgacaagcaaagcatttctcagtcaaatcaatttattaaacgcggtacgccgcaatttatgcgcgtcaccctggcgcttttctctgccggactggcaactttcgcacttctctattgtgtgcaacctatccttccggtgctttcacaagagtttggcttaacgcccgcgaacagtagtatttcactgtccatttcaacggcgatgttggctatcggtttgctgtttactggcccgctatccgatgccattggtcgcaaaccagtgatggtcacggcgctactgttggcctccatttgtacgttactttcgacaatgatgaccagctggcacggcattttgattatgcgcgccttgattgggctttcgttaagtggcgtggcagccgttggcatgacttatcttagcgaggaaatccaccccagtttcgtggccttttcaatggggttgtatatcagcggcaactcaattggcggcatgagcggacgcttaattagcggtgtcttcacggacttttttaactggcgaattgcgctggcggcaatcggttgtttcgcgttggcctcggcgttgatgttctggaaaatcctccctgaatcacgccattttcgcccgacttcgctgcgccctaagacgttattcatcaactttcgtctgcactggcgtgaccggggattaccgttattgttcgcagaaggctttttgctgatggggtcgttcgtcacgctgtttaattacatcggctataggttgatgctttccccctggcatgtcagtcaggccgtggttggcttattatcgctggcttatttgaccggtacatggagctcacccaaagccggaaccatgaccacccgctatggacgcggtccggtgatgttgttttcgacgggggttatgctgtttggtttactgatgaccttattcagctcgctgtggctgatctttgccggaatgttactcttctcagccggattcttcgcagcccactccgttgccagcagctggatcggcccccgcgcaaaacgcgctaaaggccaggcctcctcgctgtatctgttcagttactatctggggtcgagtattgccgggacgctgggtggtgttttctggcataactatggctggaacggcgtcggcgcatttattgctctgatgctggtcattgctctgctggtcgggacgcgtttgcatcatcgtctgcacgcctgaaaaaataagtccggactgaggtaaatacccgtccggacttattgcctgctcaaaccaacgttaatagccatcctaaaaagccaattcccgcagcgcatctagcgtcatcaggattataagtacccaaataaacggattcattttgctgtgtgtcatttattactgatgcgcagttattctaccgctttgtaagtagtaaaatagttaacacgatcaagactactattattggtagctaaattttccttaagtcacaatacgttattatcaacgctgtaatttattcagcgtttgtacatatcgttacacgctgaaaccaaccactcacggaagtctgccattcccagggatatagttatttcaacggccccgcagtggggttaaatgaaaaaacaaattgagggtatgacaatgaaaaaagtattagctctggttgttgccgctgctatgggtctgtcttctgctgcctttgctgcagagactgcgaccacacctgctccgactgcgacgaccaccaaagcagcgcctgcgaaaaccacacatcataaaaaacagcataaagcagcacctgcccagaaagcgcaggcggctaaaaagcatcataaaaatgccaaagctgaacagaaagctcctgaacaaaaagcgcaggcagcgaagaaacacgccaagaaacacagccatcagcaaccggcaaaacctgctgcacaacccgcagcgtaagttttcaacagtaatgctggcgcgccccctcgcgcctgaaaattacggtgctaagcgggtaacgtttagcaccgcctttagcggagggtagtatggtgggccgttatcgctttgagttcattcttatcatccttattttatgcgcactgattgccgcccgtttttatctttcctgatcgtagttatctgattttactcccactttcatcccgtcccgtctatagtatttatgagggtttgcttttaataatcataattacccaccagagtgtgatatgcgtacaaccattgctgtagtgttgggtgcaattagtttgacgtctgcttttgtgtttgcagataaaccagacgttgccaaatcggcaaacgatgaggtcagcaccctgttttttggtcatgatgatcgtgtgccagtgaatgacacgacccaatcaccgtgggatgcggttggccaactggaaacggccagcggcaatttatgtacggcgacgctgattgcacccaatctggcattaacggcaggacactgtttattgacgccgccaaagggtaaagccgataaagcggtagcgctgcgtttcgtgtcaaataaaggtctttggcgctatgagatccacgacatagaaggccgcgttgatccgacactgggaaagcggttaaaagcagatggggatggctggattgtacctcccgcagctgcgccctgggacttcggtttgattgtgctacgtaatcccccttctggcattacaccgttgccgttatttgagggagataaagccgcgcttaccgccgcattaaaagcggctggtcgtaaagtgactcaggcgggctaccctgaagatcatctcgatacgttgtacagtcatcaaaactgtgaagtgactggctgggcgcaaacgtcggtgatgtcgcatcagtgcgataccttgccgggtgacagcggttcgcctctgatgttgcataccgatgacggctggcaattaattggggtgcaaagctcggctcctgccgcgaaagatcgctggcgcgccgataaccgggccatttctgttaccggttttcgcgacaagctggatcaactgtcgcaaaaataatgttcaaacgctgcccgacagcgcgggcagcgtgttcatcaggcaagtttcaccatgatcattccagccaacagcaagaccaggccaatccagcctttacgatttaaccgttgaccaaacaagatccaacctgcggctaacgtggcggcaataccaaacccgccccacaatgcataagcgacagacaagtcgatccctttaacggcctgagaaagcgcactaaaggcagccagcaccgccgccagagagagcaagccaaatattttgcgacgaaagccgtcagaaaatttcaaaaagacgttagcaatgatttccagcacgattgccaatgccagccaggcggcgtgaacccattcaaactgcgccatggttcacctccagttcaggtttacgcgctttacgggtacctgatttgatcaatacaatcccggcgaccagggtggttaacccggcaattttcatcagcgatagactttcgtcgaataacaaaacgctaaacaaggtaataaataaaataccgataccttcccacagcgcataagccacgcctaaggcgatctttttaacggcgaaagagagaaatatatacgacagagaaatcatcaccagcattaaaataaagccgccatttccctcactgacgctcgcccatttcatagacagcgtaccggtaatttctgtagcaacagccagacctaataaaatccaataaatatacattgtccttctcctgcaagagaattattttaattttcgcttaattcagcgaaaccaaagtaaagtggtcaagccccgcgcatagcgcaagcttaagcagaagaaaggactaaagcgcgttgcgccagtgctgctcacctacgagcaagatagtggatgaggtacgaagatgggtaaatgtagaaaataacgtcctgaacaaattgtccataatattacaattatccgcagtgttgcttctcgtcatcgcggatgataattgtcctcggtagttgaacacgcctgatttgtatcatagcttaagaattaactcaaaatattttcacttctttacctgcgcggtttgattttcgttatgatgacggagcgaaaaagacattattattagccaaggaagaaaaaacggggacaagcatggcaaagccgatcatcacgctcaatggcctaaaaatcgtcattatgttgggaatgctggtcattattctctgcggtatccgttttgccgccgagatcatcgtgccgtttattctcgcattatttattgctgttattcttaacccgctggtgcaacacatggtccgctggcgagtgccgcgtgtactggcagtgtcgattttgatgaccatcatcgtgatggcgatggtgttgctattagcttatctgggttccgcgctcaacgagttgacgcggacgttaccgcaatatcgcaactctattatgacgccgctgcaagcgattgaaccgttgttgcaacgcgtagggattgatgtctcagttgaccaactggcgcattacattgatccgaacgcggcgatgacgttgctcaccaacttattgacgcagttatctaatgccatgtcatcaatctttttattgctgctgacggtgctgtttatgctgctcgaagtgccacaattgcccggaaaatttcagcaaatgatggcgcgtccggttgaagggatggcggcgattcagcgtgcgattgacagtgtgtctcattatctggtgctgaaaacagccatcagcatcatcaccggcctggtcgcctgggcgatgctcgccgcactcgatgttcgcttcgcttttgtctggggattgctggcctttgcgcttaattacatcccgaatattggttcagttctcgcggcaatcccccctatcgctcaggtactggtgtttaatggcttctacgaagcgttgctggtgctggcgggatatctgctgattaatctggtcttcggcaatattctggagccgcgcatcatgggacgtgggctggggctttccacattggtggtatttttgtcgttgattttttggggatggttgttaggaccggtgggtatgctgctttccgtgccgttgacaattattgtcaaaattgcgcttgaacaaacagcgggaggtcaaagcatcgccgttctgttaagcgatctcaataaagagtgacggcctccgcagaggccgtcagggttacagagccttcaggattgcatccacgctggctttggcgtcaccaaacagcatgtgggtgttttccttgaagaacagcgggttttgcacaccagcatagccagtgttcatcgaacgtttaaagacaatcacgttctgcgctttccacacttccagcacaggcataccagcaatcggactcttcggatcatcctgcgccgccggattaaccgtgtcgttagcaccaatcaccagtacggtatcggtatcagcaaagtcatcgttgatctcgtccatttccagcacgatgtcatacggtacttttgcttcagccagcaatacgttcatatgtccaggcaaacgccccgcaaccgggtggataccgaaacgcacattaataccacgagcgcgcaatttctcagtaatttcagcgacaggatattgcgcctgcgcaactgccatgccgtaccccggagtaatgatcactgaatgggagtttttcagcagttccgctgtctcttctgcagtgatttcgcggtgctcgcccacttcctgatcatcaccagtagaagagccgtcggtgccgaaaccacccgcaataacgctgataaaggaacggttcatcgccttacacataatgtaagaaaggatagcccccgaagaaccgaccagcgcaccggtcacaatcagcaggtcgttgctgagcataaagcccgcagccgcagccgcccagccggagtacgagttcagcatcgacaccaccactggcatatctgcaccaccgatggaggcgactaaatgccagccgaataccagcgcaatggcggtcattatcagcaatgccagcacttgcaggccgacgctgtccgtgcgaacaaatacaatcagcagcaggaaggaaacgaccagagccgccaggttcattttgtgacggtttggcagcatcaacggtttagacgaaatcttgccacacagtttgccgaacgccaccaccgaacccgtgaacgttaccgccccgatgaagataccgaggaacacttccgtcaggtgaatattgaccagaatcggtgccattcccgcgtcatgatgcagatagctgttaaaaccaaccagcactgccgccagacccacgaagctatgcaggatcgccaccagttctggcatttcggtcatttcaactttcttcgccagacggataccaattgccccaccaatgaccatagccagcaagatccagccaacattacccgtatccggtccaaaaatggttgcgattaacgcaatcgccatcccggcgataccgaagttgttaccctggcgagacgtttcatgtttcgaaagaccggccagactgaagataaacaggatcgcggcaacaatgtatgcagctgtaactaatcctccagacatatgttaccccttaatttttgcggaacattttcagcatgcgctgagtcacggtgaagccaccgaaaatattaatgctggctataagcaccgcgataaaactaaggaagctaacccagccgccctggccaatctgcaacagtgctccgacaacaataatccctgaaatcgcgttggtgaccgacatcaacggtgtatgcagcgcgtgcgatacattccacaccacgtaataaccgacaacgcaggccagcgcgaacacagtgaagtgtccaaggaactcttttggcgcaacgcttgccatccagccgaaaaggatgattgccaacgccatcaacgcgtatttacgccacggtgagcaggcacatttttcctcagttttcacttccggtgccgctttttgtgccgcctgcggctgagctgatacctgaatcggcggtgccggccaggtaatttcgcccgcacggatcacagtcacgccacgaatcaccacatcatcaaaatccacagtgatgttgccgtctttctctttgcacaacagtttcagcagattaacgaggttagtgccgtaaagctgtgaggattgcgtcggcagacggcccggaagatcggtgtaaccaattactttgacaccattttccgtagtgaagatttcacccggcacggtgtattcacagttgccgccgttttgggctgccaggtcgacaatcacactgcccgccttcatggagtcaaccatttcacgggtaattagcttcggcgctggtttgcctggaataagcgcggtggtgacaatgatatcgacctcttttgcctgggcggcaaagagttccatttccgctttgatgaacgcgtccgacatcactttggcatagccatcgccgctgcccgcttcctctttaaaatccagctcgaggaattctgcgcccatactttgaacttgttctttcacttccgggcgggtgtcgaatgcacgcacaatcgcgccgagactgtttgctgcgccaatggcggccagacctgcgacaccggcaccaatcaccatcacttttgccggtggcactttcccggccgcagtgatttgtccggtaaagaagcgcccaaattcatgtgccgcttcaacaatggcgcgataaccggcgatattcgccatcgagcttagtgcgtccagcgattgtgcgcgtgagatacgcggcacagagtccatcgccatcacggtcacgttacgttccgcaagtttttgcattaattccggattctgcgcaggccagataaaactcaccagcgttgtcccaggattcagtaacgcaatttcatcatctaacggcgcattgaccttcagaatgatctctgactgccagacgctattcccttctacaatttcagcgcccgcttgcacaaacgctttatcgtcaaaacttgccagttgacccgcgccgctctctaccgcgacggtaaaacccagtttcagcagctgttccactgtttttggcgttgctgcaacacgggtttcattggttaaccgttctcttggtatgccaattcgcatgatattcccttccatcggttttattgatgatggtttgcttgtgtcaggagccacacaagccgctcatgtacgagctaaatgttactccgttaaaataaattagtaacaaacgccctataacgtactgaaaattatgcctgtgatctagcgccaaaaatcagtatttcggcgtgaactcgcaaaatattaacgattcagccgtgatagtgggataaacaccttagaacgccggataaagactgataattgtcttcggcggccgggtaaaacgagacatcgccccggcacaaatcactacttaacattaaattaacttatacaattcagttgcttcagtagtattgatggtgatacggctgttttttaagcatagacggtcatttgagcagaattaaaattggtttaaggaatgtgatatgaaaaatgacgcagacagttacaccgtttaaatgcaataatcagccacgtttctcgttaataacaataccagtacctggtttgcgcaaggcgaaggattatttttatgaagcttaagaacaccctcctggcgtcggcactgctttctgctacggcattctccgttaacgcagcaacagaactgacaccggagcaagcggcagcggttaaaccttttgaccgtgtagtgattaccggtcgttttaatgctattggcgaagcggtgaaagccgtttctcgtcgcgcagataaagaaggtgccgcctctttttatgttgtcgacacttctgattttggtaacagcggtaactggcgtgtggtcgctgacctctataaagccgatgctgaaaaagcagaagaaacaagtaatcgcgtaattaacggtgttgtcgaactgccgaaagatcaggctgttctgattgaaccgtttgacacggtcaccgtccagggcttctatcgtagccagccagaagtcaatgatgccatcaccaaagcagcaaaagcgaaaggtgcctactctttctacatcgttcgtcaaatcgatgccaaccagggcggcaaccagcgtattactgcattcatctataaaaaagatgctaagaaacgtatcgtccagagcccggatgtcatcccggcagattccgaagcaggacgtgcagctctggctgccggtggcgaagctgcgaagaaagttgagatcccgggtgttgcgactaccgcatcaccaagttctgaagtcggtcgcttctttgaaacccagtcatcaaaaggcgggcgttacaccgtcacgctcccggatggcactaaagtcgaagaactgaacaaagcgacagcagcgatgatggtcccgttcgacagcatcaaattctctggcaactacggcaacatgaccgaagtctcctatcaggttgcgaaacgtgccgcgaagaaaggtgctaagtattaccacatcacccgccagtggcaggaacgtggtaataacctgaccgtcagcgcagatctgtataaataactattcagttactcctataaggcggcttgatgccgcctttcgcatttttagtcataaatttccctgcgaccattgcatgcagacacatctcttcgtaaaatcccgcgcttcagtggcaaactccatttttatgcgttttgccctaatatttattcttcttgtcacgttttaatcactggatatcgatggaaaagaaactgggactgagcgcactcaccgcgctggtattaagctcaatgctgggcgcgggtgttttcagtctgccgcaaaatatggcggcagttgccagcccggcagcactgctcatcggctggggtattactggcgctggcattttattgctggcctttgccatgctgatcctcacgcgcattcgccccgaacttgacggcggtatctttacctatgcccgcgaagggtttggcgagctaatcggcttttgttccgcatggggatactggctgtgcgcggtcatcgccaacgtctcctatctggtgatcgttttttccgcgttaagcttttttacggacacgccggaattgcgcctgtttggcgatggtaatacctggcaatcgatcgtcggtgcatcggctttattgtggattgttcactttttgatcctgcgcggggtgcaaaccgctgccagcattaaccttgtggcgacactggcaaaattgttgccgttgggtctgtttgttgtgctggcgatgatgatgttcaaactggataccttcaagctcgacttcaccggacttgcacttggcgtacccgtgtgggaacaggtgaaaaacaccatgctgatcaccctgtgggttttcattggtgtggaaggtgccgtggttgtttctgcgcgtgcgcgtaataagcgtgatgttggcaaagcgacactgctggcggttctctccgctctgggcgtttatttgctggtaacgctgctttcgctgggcgtggtggcacgtcctgaactggctgaaattcggaacccgtcaatggccggtctgatggtggaaatgatgggaccgtggggcgaaatcatcatcgctgccggtttgatcgtttccgtttgcggcgcgtacttaagctggaccatcatggcagcagaagttccgttccttgcagccactcataaagcattcccgcgcatttttgcacgccagaacgcacaagctgcgccatccgcttcactgtggctgaccaacatctgcgtgcaaatttgtctggtgctcatctggctgaccggttccgattacaacacattgctgaccatcgcctcagaaatgattctggtgccctatttcctggtcggcgcgttcttgctgaaaatcgcaacccgtccactgcataaagcggtaggtgtcggtgcctgcatttatggcttatggttattgtacgcctctggtccaatgcacttgctgttatccgttgttctgtatgcaccggggctgctggttttcctgtacgcgcgtaaaacgcatacccatgataatgtactgaatcgtcaggaaatggtgctgattggcatgctgttaattgcctcagttccggcgacctggatgctggtgggataacgttcatcccatcgttggatagcaaaggagataacgatgggtaaaacccagtccttgccaatattaattactggcggaggtcgccgcatcggcctcgccctcgcatggcatttcattaatcaaaagcaaccggtgattgtcagctatcggacgcactatcccgccattgatggactgattaaggcaggtgcgcagtgtattcaggctgatttttcgaccaacgacggtgtgatggcgtttgccgatgaagtactaaaaagcacccatggtctgcgtgctattttgcataacgccagcgcgtggatggcggaaaaaccgggagcgccactgaccgacgtactggcttgcatgatgcagatccacgttaataccccatacctgctcaaccatgctctggaaagattactgcgtgggcacggacacgccgccagcgatatcattcactttaccgattatgtggtggagcgcggtagcgacaaacatattgcgtatgctgcaagcaaagcggcactggataatatgacccgctcgtttgcccgcaagctggcaccggaagtgaaagtgaattctattgcgccatcgctgatcctgtttaatgaacatgatgatgctgaatatcgacaacaggcgctgaataaatcactgatgaaaaccgcgcctggcgagaaagaagtgatcgacctggtcgattacttacttaccagctgctttgtcaccggacgcagtctcccacttgatggcggtcgtcatctgcgttaatgcagcttaatccagcatataatcaacacccatgcgcttattccccagcacgcaacagagccaacaaaagcagcgggcaagcgcatcattccggtgaaataccatagggacgccaggtaaacaaaatagggaataatcgaccacatactaaaaatgatggttgcgcgtaaggcttcaatgccgcgttcgctggcaacaatataatgcgcgataagcgcaaaggtcgggaaaagtggaatcagcccggcgatataataatttttcgtttttgctaaaacaccaatcaacagcactaccagcgcaccgagcgcggctttgattaccagccccatctttttaccttaacactttcataacaagtcatcagtagaatacctgatgaaaccttgtttagaaacgattgatagtaagtaaaaacagtgcggtgtattgtgacgtttttatatctaccgtgaatgttatgaacactatcgtatttgtggaagatgatgcggaagtcggtgcactgattgccgcatacctggcaaaacatgatatgcaggttaccgtagagccgcgcggcgaccgggccgaagaaactattctgcgagaaaatccggatttggtgttactcgacatcatgctaccaggcaaggacggcatgaccatttgtcgtgatttacgcgcaaagtggtccggaccgattgttcttctaacctctctcgatagcgatatgaaccacatcctggcactggaaatgggtgcctgcgactatattctcaaaacgacgccccctgctgttttgctagcgcgtttacgtttgcatttgcgtcagaatgagcaagccacagtgaccaaaggtattcaggaaacgtctctgactccctacaaagccctgcatttcggcacgttgaccatcgatcccatcaaccgcgtagtcaccctggctaacactgaaatctcgctctcgacagctgatttcgaattattgtgggaattagctacccatgccgggcaaatcatggaccgcgatgcattgctgaaaaatttacgcggcgtcagttatgacggactggatcgtagcgtggacgtggctatttcgcggttaagaaaaaaactgctcgataacgccgcagaaccttatcgtattaaaaccgtgcgtaacaaaggctatctttttgcgcctcatgcgtgggaataagcgatgaaaaaactgtttatccagttttacctgttattgtttgtctgcttccttgtgatgtctctgctggtcgggctggtgtacaaatttaccgccgaacgcgcaggcaaacagtcgctggatgatttgatgaacagttcgctgtatctgatgcgcagcgaattgcgtgagatccccccacacgactggggtaagacgctgaaagagatggatttaaatctctctttcgatctgcgtgtcgagccactgagtaaataccatcttgatgatatttccatgcaccggctgcgtggcggcgaaattgtcgctctggacgatcagtacacttttttgcaacgtatcccgcgcagccactacgtgctggcagttggtcctgttccttatctttattacctccatcagatgcgattgctggatatcgccctgatcgcttttattgccatttccctcgcctttccggtgtttatctggatgcgtccgcactggcaggatatgttaaaactggaagcagcggcgcaacgatttggcgatgggcatctcagtgagcgtatccactttgatgaaggttcgagctttgaacgacttggcgtcgcatttaaccagatggcggacaatatcaacgccttgattgccagcaaaaaacagcttattgacggtatcgctcacgaactgcgaacaccgttagtgcgcctgcgttatcgactggagatgagcgataacctgagcgccgccgaatcccaggcgttgaatcgcgatatcagtcaacttgaagctttaatcgaagagctgctgacttatgcccgactcgaccgcccacaaaatgagcttcatcttagcgaaccagacctgccgttgtggctgtcaacgcatctggcagatattcaggcagtaacgcccgataaaacggtacggataaaaacgctcgcgcaaggccattatgcggcgttggatatgcgcttaatggagcgcgtgctggataatttgctcaataacgccctgcgctactgtcactcaacggttgaaaccagcctgctactgtcggggaatagagcgacattaattgttgaggatgatggcccagggattgccccagaaaaccgcgaacatatctttgaaccttttgttcgcctcgatcccagccgggatcgctcaaccggcggctgcgggctggggctggcaattgtccactctatagcactggcaatgggcggtacggttaattgtgacaccagcgaactgggtggtgcccgcttctcgttcagctggccgttatggcataacatcccgcaatttacctctgcctgacactatgcgcacggtggtcaagtcaccaccactgtgctataaaataaggatgttgtaactaaagtggttaatattatggcgcgttacgatctcgtagaccgactcaacactacttttcgccagatggaacaagagctggctgcatttgccgctgagctagaacagcacaaattgctggttgcccgcgtgttctctttgccggaggtaaaaaaagaggatgagcataatccgcttaatcgtattgaggtaaaacaacatctcggcaacgacgcgcaatcgctggcgttgcgtcattttcgccatttatttattcaacaacagtccgaaaatcgcagcagcaaggccgctgtccgtctgcctggcgtgttgtgttaccaggtcgataacttttcgcaagcagcgttagtcagtcatattcagcacatcaataaactcaagaccacgttcgagcatatcgtcacggttgaatcagaactcccctccgcggcacgttttgaatgggtgcatcgtcatttgccggggctgattacacttaatgcttaccgcacgctcaccgttctgcacgaccccgccactttacgttttggctgggctaataaacatatcattaaaaatttgcatcgtgatgaagtcctggcacagctggaaaaaagcctgaaatcaccacgcagtgtcgcaccgtggacgcgcgaggagtggcaaagaaaactggagcgagaatatcaggatatcgctgccctgccacagaacgcgaagttaaaaatcaaacgtccggtgaaggtgcagccgattgcccgcgtctggtacaaaggagatcaaaaacaagtacaacacgcctgccctacgccgctgattgcactgattaatcgggataatggcgcgggcgtgccagacgttggtgagttgttaaattacgatgccgacaatgtgcagcaccgttataaaccacaggcgcagccgcttcgtttaatcattccacggctgcacctgtatgttgcagattaacccccggctttcatactgccgaccatctgttctggccgtacccagcggtcaaactcggcttcgctaagataccccagcgcaagggccgccgcttttaaggtcagcccttctttatgcgcttttttggcgatctcggcggctttgtcataaccaatgtgggtgttaagcgcagtcaccagcatcagcgattcattgagtaattgattgattcgctcacgattcggttcaatgcccactgcacagtgtttgttgaaactttccatgccatctgccagcaagcgcaccgattgcaggaaattatggatcaccatcggacggaagacgttcagttcaaagttaccggaagcgccacccatgttgatcgccacgtcgttccccatcacctgacagcagagcatggttaatgcttcgcactgtgttgggttcactttccctggcatgattgagctgcccggctcattttccgggattgagatttcaccaattccgcagcgcgggccagaggccagccagcggacatcattggcaattttcatcagtgacgcagccaaccctttcaatgcgccgtgcgcctgaaccagggcatcacaggtcgccagcgcttcaaatttgttcggcgcggtaacaaacggtgcacaggtaatgactgccagttcatctgctacgcgacgcgcatattccggatgggtatttagtccagtacccaccgctgtaccgcccagagccagttccgctacgtgaggcaggctgtattcgatatgtttgagattatgctccagcatcgctacccagccggaaatctcctgccccagcgttaacggcgtggcgtcctgcaagtgggtacgaccgattttgacgatatcggcaaatgcgcgggatttttcactcagcgtctgggtcagggttttaagttgtggaatgagttgcttgcgcagcgccagcagcgccgcaacgtgcatcgccgtcggaaagacatcgttggaactttggcttttgttcacgtcgtcgttagggtgaactttacgttccatcccgcgcacgccgccgagtaattcactggcccggttagccagcacttcgttcatgttcatgttactttgcgtgccggagccggtctgccagatagccaacgggaattcgtcgtcatgctgtcctgccagtacttcatccgccgcctgccgaatggcgctcgctttctcttcagacaacaagcctaaatcttcattaacttttgccgctgcgcgcttggttagcgccagcgcatgaatcagtgaggtgggcattttctccgtcgaaatgcggaaatgctccagcgagcgttgagtttgtgcgccccacagcttatctgccgggacatcaatcgcccccatcgaatctttttcgctgcgtactgtattcatggcctgctcctcacctgattaattttttctttctgttttgctttcgttaagcaacttttagcttactcattatttaccatttgataacaaatgtttggtctttcgtgccatgtaaaaaaaccgccccgaagggcggctctgtttatttcacacagcgggtgcattgtgtgagttgtatctgctggaagaagtcatttcctttatcatccacaaggataaacgccgggaaatcttccacttcaattttccagatggcttccattcccagttccggatattcaacacattccaggctcttaatacttccctgcgccaatacagctgccggaccaccgatactgccgaggtagaagccgccgtgttttttacaggcatccgtcacctgctggctgcggttgcctttcgccagcatgatcatacttccgccctgcgcttgcagttgatcgacataagaatccatccgtccggcggtcgttgggccaagagaaccggaggcataaccttccggcgttttggccggacccgcgtagtaaatcggatgatctttaatgtactgcggcagcccttcaccgttatccatccgctctttcagtttggcgtgagcaatatcacgaccgacgataatcgtgccgttaagcgataagcgtgtagaaacgggatactgcgacaactgtgcgaggatctctttcatcggacggttaaggtcaacgcgcaccgcttcgccttctcctgctttgcgcagctcttccgggatatatttgcctggattatgttccagtttttcgatccagatcccctgacggttgatcttcgctttgatattacggtcagcagaacaggagacgcccataccgaccgggcaggatgcgccgtgacgtggcaggcgaatcacgcggatgtcatgagcgaagtatttaccaccaaactgcgcacccagaccaagattttgcgcttcgatcagcaattctttttccagttccacatcgcggaacgcctgaccgtgctcattcccttccgttggcagttcatcatagtatttagcggaagcgagtttcaccgttttaagattcgtttctgcagaagttccaccaataacgaacgcaatatgatacggaggacaggccgccgtacccagcgtgcgcatcttctcaaccaggtaatttttcagttttcccggcgtcagtaacgctttggtttcctgatagagatacgtcttgtttgccgaaccgccacctttggcgatacagaggaatttgtactcgtcgccatcaacggcataaagatcgatctgcgctggcaagttggtgccggtattcacctctttatacatatccagcggcgcgttttgcgagtagcgcagattatcctcgatataagtgttatagacaccgcgcgccagcgccgcttcatcaccgccaccggtccatacacgctgcccttttttaccaacaataatcgcggtgccggtatcctgacaggttggcagaacgccttttgccgcgatgtcggagttacgcaggaattgcagcgccacatatttatcattttcgctggcctccgggtcacgcagaatgtcggccacctgttgttggtgagccggacgcagcataaatgacgcatcatgaaacgcctgacgcgccaacagagttaacgcttcgggtgcgactttcaaaatctcctgcccttcaaattcagatacgctaacgtgttcgctggttagcaggtaatactcagtatcatcttttttgagtggaaaaggagcctgataatgaaagggtttgtttgacattgttctctcacttactgcctggtttggttatgctctgggcgggtgttccgttgccctgttaaaagcgagtaacaatatcctacacacttttttaacaaaaactgagactagtacgactttttgcggctccaggttacttcccgtaggattcttgctttaatagcgggattaatttccacattaaaacagggattgatcatgcaaaaactcattaactcagtgcaaaactatgcctggggcagcaaaacggcgttgactgaactttatggtatggaaaatccgtccagccagccgatggccgagttgtggatgggcgcgcatccaaagagcagttcacgtgtgcacgatgccgcaggagatatcgtttcactgcgtgatgtgattgagagtgataaagcgactcttttgggagatgccgttgccaaacgctttggcgagttgcctttcctgttcaaagtattatgcgcagcccagccgctctccattcaggttcatccaaacaaacgcaattctgaaatcggttttgccaaagaaaatgctgcaggtattccgatggatgccgctgagcgtaactataaagatcctaatcacaagcctgagttggtttttgcgctgacgcctttccttgcgatgaacgcgtttcgtgagttttccgagattgtctccctgctccagccagtcgcaggtgcacatccggcgattgctcactttttacaacagcctgatgccgaacgtttaagcgaactgttcgccagcctgttgaatatgcagggtgaagaaaaatcccgcgcgctagcgattttaaaatcggccctcgacagccagcagggtgaaccatggcaaacgattcgtttaatttctgaattttacccggaagacagcggcctgttctccccgctgttgctgaatgtggtgaaattgaatcctggcgaagcgatgttcctgttcgctgaaacaccgcacgcttacctgcaaggcgtggcgctggaagtgatggcgaactccgataacgtgctgcgtgcaggtctgacgcctaaatacattgatattccggaactggttgccaacgtgaagttcgaagccaaaccggctaaccagttgttgacccagccggtgaaacaaggtgcagaactggacttcccgattcctgtggatgattttgccttctcgttgcatgaccttagtgataaagaaaccaccatcagccagcagagtgccgccattttgttctgcgtcgaaggcgatgcaacgctgtgtaaaggttctcagcagttacagcttaaaccgggtgaatcagcgtttattgccgccaacgaatcaccggtgactgtcaaaggccacggccgtttagcgcgtgtttacaacaagctgtaagagcttactgaaaaaattaacatctcttgctaagcttattaaaggcttataacaccttcaggcggccagtccgcctgatttcattttatggataatcattatgaataaatcgctggtagcggtaggcgtcattgttgcgctaggcgtagtctggacaggcggcgcatggtatacaggcaagaagattgaaacccatctcgaagacatggtcgcgcaggcgaacgcgcaactcaaactgacagctcctgaatccaacctggaagtcagttatcaaaactatcatcgcggcgtattcagcagccagttgcaactgttggtgaaacccattgccggaaaagtaaatccgtggattaaaagcggtcagagcgtcatcttcaacgaatcggttgatcatggtcccttcccgcttgcccagcttaaaaaactgaacctgatcccgtcgatggcatcaattcaaaccacgctggttaataacgaagtaagcaaaccactgtttgatatggcaaaaggtgaaacgccttttgagattaactcccgcattggttacagcggagattccagttccgacatttcgctcaagccactgaattacgagcaaaaggatgaaaaagtcgcatttagcggcggcgagttccagttaaatgcagacagagacggcaaagctatctccctttccggggaggcgcaaagtggtcggatagacgcggttaacgaatacaaccagaaagtgcagttaacctttaataatctgaaaaccgacggttccagcacgctggcaagttttggtgagcgcgtaggaaaccaaaaactgtcgctggaaaaaatgaccatttcagtggagggcaaagaactggcactgctggaaggcatggagatcagcggtaaatcggatctggtcaatgacggtaaaacggtcaatagccaactggattactcgctaaacagcctgaaggtacagaatcaggatctgggcagtggcaagctgactttaaaagtcggccaaattgatggcgaagcctggcatcagtttagccagcaatataacgcgcaaactcaggcgctgctggcacagccagaaattgccaacaatcccgaactttatcaggagaaagtgacggaagccttctttagcgctctgccgctgatgctgaaaggcgatccggtgattactatcgcgccgctaagctggaaaaacagtcagggtgaaagtgcgctgaatctgtcgctgttcctgaaagatccggcaacgactaaagaagcgccgcaaacgctggcgcaggaagtggaccggtcggttaaatctctggatgcgaaactgaccattccggtggatatggcaactgagttaatgactcaggtagcgaagctggaaggttatcaggaagatcaagcgaaaaaactggcgaaacagcaagttgaaggtgcatcagcaatggggcagatgttccgtctgaccaccttgcaggacaataccatcaccaccagcctgcaatatgctaacggtcagataacgttaaacgggcagaaaatgccactggaagatttcgtgggtatgtttgcgatgccggcattaaacgttccggctgtacccgctattccgcagcagtaattcacagccaaaacgccggagatttttctctccggcgttttttcttacttcagcataaagtcatactgaatactcattttcacatcccagtaattcaggcgatcgcccagcgcactgccatcgcgcttttcccgccctttatcggcagcaagaaagaaattcatcccttgtaacggcccttcgctgacccgatagttcataccacctaagatacccgcgccttcaatccgcacatctcgtttactggattcatagccgcgagtcacaatcggtgcaaatgtcagcgtaaattgcggagttaaacgatagttaacgcccaattgccaggactgcattccttcacggttacgatcaagacttaatgaaaagggatagccaatgtcggtatccaccacggcaccattcattgcatggcgcaaataaccaccactgccaaatacgcttccccacggcgcaatccaggtcaattgtccactaaccaacgccgtttcattgggctggctggtattacgacttaaaccttcgagttgcgcgtaaaagccgagcaactcccctttcaacgtataattcgggtcgagcggtatgcttttctcgagaatactttgtatctgattggaaacatctttctgtaccgatgcccccagagaatagcgactggtatcatcatgccaactggcggctaaaaaagaacgtgcgcgatgtttatcgtattttcccgtctggctgttatacaccccttcatcacgaataccggttgttgaatcggtccataaaaatactcgtgaacgccacattccccacaggtcaatatttggcgttaaagcccaacaacctaatgctccttcagaaactgtcggtaatgtacgttgcgaactgccagccattaacggaatacgataaggtaagctaccataactataatccgtcccgaagcgacctaatttaagcagactactttcactgggttttatttttactgcccccagggtaaagccaaaacttttatcaccatcaagataccaccgggtgctcatatcagcacgagcacctaatttataaacataatacgccccgccttcaacgccaataatattggaataataaccactattgaaatcgagcaatcctccctgtacccatgcgtaaatatctctccccgcgccagcactgggcttatcagccctgcgtaattcatttttcagtctgatgcgtagtcccgcttcatcgtcagccagttgcgccgcgtaagcagaggtaaggccagaggcagccgtcaggcaaataacggccatggccactatttttctcatagttgcacctttgatgttctgattatttttattgaatattaactagtgatatcgttgattaattgctgctgcacttttttacgattatcaatttcaacaacgatttctttgaattttttatccgtgagcggataaaaccagataatgacgaatgccagtagcataaatccgcaaggtactaaggcaattgatgtgcggatgcccataataacttccggcgtttgcgcctgattggcgatatatccgcttaatcccaaaataaaggcaggaattgaacctccgattgcctgaccgcatttacgggtaaatgagaatagtgaataggtgagcccttcaattcgcacgccagtcaggtattcaccgtattctacggtatcagcttccagtgcccacatcacggtcatggtaacgccctggccaattgatgcgatggccaacgcaaccaacgccaccggcagtgaccagacggaaacccagaagaacagcagataaccgcaggttcccagcaaagcgccaatcaggaaggtattctttttaccgatcctcgcgaccatccccggcaccagcggtgccgatgccacagtaccgaccaggttttgcaccagtaccagcacagtgaacagcccggtatcatttaacacatagcgcacgtagaacaacgacgaggcgctgaccgcgaaggtcgaaatcagcacacacagcgcaccgatgcacaacataaacagcgggcgattccgtttcagggtttgcagactgatcttcaatgacggctgcgccacgatacgtaccacattctcacgcgtcgatttgaagcagatgaagtaaagcaccattccggcaatcgccagcacaattgtccagaaatgatataccgacaccatctcttccgggctggagttcttaatgctcggtcctatcagaaatgccaggcagacaaaggtcaatgaagcggcaatcccgcgagccgcgcccagacgggcgcgggattgtggttgttgggtcatcgcggtagcaagtgaaccataaggaatattcaccaggctgtagcaaagcccgagtcccatgtaggtcaaatatgcatacacaactttgctgctatggctccagtcggtcggcacccagaataccagcacgctgaagatcattaacggcgcagtaccgaagagtaaaaacgggcggaattttccccatcgggtattcacactgtccaccactcgtccggcaaagacatcggcgaaggcatcgaatacccgcaccagtaacagcatggtgcccgccgcagcggcaccgacgccagcgacgtcggtgtagtaactcaacaggaagagcgcccccattgcgaaggcgaagttattggcgacgtcaccgaggctgtagccgacgatggtgcgccaggagagttgttgattcattgtttgcctccctgctgcggtttttcaccgaagttcatgccggtccagcgtttttgcagcagaaaagccgccgacttcggtttgcggtcgcgggtgaagatccctttcttgttaccgccaacgcgcaatatgccttgcgaggtcgcaaaatcggcgaaattccatacctgctcaccgacgacagcgctgacgcgatcaaagacgcggtgatacatatccagccatgcacactgatactcttcactccacatgtcggtgtacattgagtgcaggccggctaacgtatccacaccgtattcggtgatgataatcggctgatgcagtttctcctgccaggccagaagttctttttccagaaccttctctgccgtttccaaatcgccgctttggacataccaaccgtaataacggttcaggcacagcacatcaaagagatcgctgatggtatcggtgtgagcgtcgcagaacattacattgacacaggtgatcggacgcgtcgggtcgagtttacgcgttgcttccgccagtggcgcaaaatattcccgtgcaccttgcggacgggtatccggttcgttggcaatactccacatcaccacgcttgggtggtttttgtcacgcgcaatcagctctttaatcgcctgtaagtgcgcctgctgggtttccccgttgactgcctcttcgctgtacagttctttcggcttgttgcccgcttcgaaaccaatgcctaaagagaggttaaagccgacagctgcagtttcatcaatcaccacaattccatgttcatctgcccagtcgagcatctcttcagcgtaagggtaatgcgaggtacggtaggagttggccccaatccagtccattagtgcgtgatcgtgcaccatcagcacgttatcgaatcctttgccgcgcaaatccgcatcttcatgacgaccaaagccagtaaagtagaacggtttgtggttgatcaggaactgttcgcccttcactgccactgaccggataccgacgcgcagcaggtagatatcacactctgtctggcttttggctgtgacgcacagttcatagagataaccttcacccggttgccagaggtgcggattcactacttgcaaagtcccgctggtgccttgtccagttgcaaccacctgttgatccgcatcacgcagttcaacgctgacatcaccatttgcccccacctgccagtcaacagatgcgtggttacagtcttgcgcgacatgcgtcaccacggtgatatcgtccacccaggtattcggcgtggtgtagagcattacgctgcgatggatcccggcgtagttaaagaaatcatgaaagtaagactgctttttcttgccgttttcgtcggtaatcaccattcccggcgggatagtctgccagttcagttcgttgttcacacaaacagtgatacgtacacttttcccggcaataacatacggagtgacatcggcttcaaatggcgtatagccgccctgatgctccatcacttcctgattatttacccacactttgccgtaatgagtgaccgcatcgaaacgcagtacaatacgctggcccgcccaacctttcggtataaagacttcgcgctgataccagacgttgcccacataattacgaatatctgcatcggcgaactgatcgttaaaactgcccggcacagcaattgcccggctttcttgtaacgcgctttcccaccaacgctgatcaattccacagttttcgcgatccagactgaatgcccacaggccgtcgagttttttgatttcacgggttggggtttctacaggacgtaacataagggactcctcattaagataaaaatactggtcaacctttaatctgattagttaaccaattctgtgttgcacacagttatctgtgagaaacccacggaagagaaatggaaataaaaagaactgacacagcgatcaaaaaaccaaaaactgcaatacccacagcgtgatattgatcgcattaatctttaaaacagcgttgacagaagccacaaaataagcaatcgaacgttcgttcgaacatattgggaacgataaaccctcatgatatattgctatgatgaatatttaggtgggattctccgatcccggggaggatgatttttgcacagagaaattacgatatgaaacgcgggctcagttgtcaccagcccgcggaaagagagagaggatcaggatgcggttaatataccgccaatcatcgcgcgtaatccctgagcaaacgacgcttcacgcgccagatcttccgcttcgatatcggccagtacaccgtaggtcagatccagcagtaaacgtgaagtcattgccgtgttgatatctgggcttatctcgcctttttgctgggcatcacgcatccgctgggcaacaaattccgtgatcgtcatatgcttatttttaagcatggcggcgacctgtgggttacgcatcccttccgccataatttcgaccaccagcgctcgttgcccaaaggcttcatgggtgagagagacaatagactcgaccatatagtcaacgaaatgaatcccttcaatcggttcccggaaacgggccagcgccctctcctggtcctgtaagataatcgcctgaatcaaggcttctttggagatgaaatggtgatagagcgtcccgggactaatggcgcaggatttacagatggctttcatcgaggcactgtgaaatccattttctgaaaaaatctctctggcagcattgaggatccgggtccgtgtcggttgtgcttcagtctgcatgttatccatcattaaaccattatagttagcatgaataactagtttaccgcgttgtcaggtgagcgcctatcattgctgttgaatagtgcgaaggcacactcaattcgtaagctttttatccggctattggttaaccaatagccgtgatttggctgccagttgtttagcagagacgttgacgagttgcacacgctatcccggtaaacaacacatacggctgtttaccggttcgttagtgtattaattgagttcctgtaccccaccaccggagacggtgagaatttgtccgcttacccagctggctgcaggcgagcaaaggaacagcgccgcgttagcaatatcttgcggttggcccagacgtctgattggtgtgtgttgcaacattttctgttcaatctctggtgtaataacggatttcagggcatcggttaatattgcccccggtgcaatgccattcacccgaatatttttttcacccaggtcaaacgccatatttctgaccagatgactggccgcagctttagatgatgcataggaggtcatgtttatatttttattttctgccgccatagaagtaatggtcagaataacgccaccgccatttttttccatttctggcgcaacaagttgtgacagatggaaaaaagaaaatacattcagttcataagcgcggcgaaaatctgccattggcatatcaaacggtttaggcccaccgccaccggcgttgttaaccaggatatcaactttacccaacttactgacggcaaagtctgccagtgcagagagttcctgttcggaagtaatatcgcagcggcaggcaaatgcctgaccacccagttgttgaatttcatttacaacatgattagctgcatcggcgttaatatcactgaccaccacagatgcgccagctgtcgcgaatgtaatggcgatttctttaccaatacctgcacccgcacctgtgatgatggcgcattttccgtcgagtctcaggttgtcagaattaaacacataaacctcctgtgaacttcagtaaaaataaaaggcaccgcctgtgtgccacattttttatcattaaccttgaggaaaggacactaccaggtatagcagataaagagaggattatttctccgcaatgagccgggcaggaataataagattgcgagaatgcgtctcttcatgggtgattttttgcatcatgcgatccgcaagtgtggtaccaagttcccgcgctggcgtgctggcccaggtaacgggtatatcatcaagtgtggttggcgttgcatcggtaaatgccgccagcgaaacctgttgctcaaagtaacgatcgactccgctttccccgctttgccttcctgctttcagcaaaccaaaccatgcccccatcgcaatagtttcgttatagcaaaccacggcgctgatggtcgggttatgacgtaaaagcgccgtgatagcttccgcggcttgcttctggctggaagtgcactccagcacccaatcgctgtgaaacggcaggccaaattttagtagagtcgcacaatagccccccacccgttctgccagggttaatgaggaactttgtcctcccagccaggcgatacgctgatgcccattgcgaatgagatgctccgtcaacaactgtgcagcctgcatgttgtccgggcgaaccgtatcaacgtcatcaagataactggcacgggaagcgaaaatcaccgggatagctttttcttctgctatccgtcgcaggtcatcgctgcttcctgcagccccggcaatgaccacaccatcgacaccctgattcagtaatagtgaaaaccgctgtgccagctgctcgccgtctttaccgccgtgaagcaaaaaaaccatccgtccctgcgcttccagagcttccgtcaatccggccgtcaattcggcgtaaaacggcgcagataaatcacggacgatcaaaccaatgacgccgctttgcccgccgcgcagcgccgacgcctggcgattgcgcacaaatcccagctcttcaatggcggcgttaacgcgttctcctgtggcggtagagattcgccctttgccactaagcaccagcgaaacggtacttaccgacacgcccgcagccagcgcaacatcatgaatggttatttttttggcggtagccatgcagatgacctactccctgattatgtgacagataaaacgttttaccttttatttatcttatacccgctattatcgttgtgtaatgtgatttatgcctcactaaaatttgataaaacgttttatcttctcgcgcaatttattgaatccagattgttctctacgaggagtcgttttatgacggcgaaaacagcaccgaaagtcacgctgtgggagttcttccagcagttaggcaaaaccttcatgttacccgtggcattattgtcgttctgcggcattatgctcggcattggtagttctcttagcagccatgatgtcatcaccctgatcccggtcctgggcaaccccgtgttgcaggctatctttacctggatgagtaagattggctcgtttgcttttagtttcctgccagtcatgttctgtatcgccatcccgctgggtctggcacgcgaaaacaaaggcgtagcggcattcgctggcttcgtcggttatgcggtaatgaacctcgcggtaaacttctggttgaccaataaaggcattctgccaaccacggacgccgcggttctgaaagccaataacatccagagcattcttgggatccagtcgatcgacaccgggatcctcggtgcggtgatcgccggtattatcgtctggatgctgcatgagcgattccataatatccgcctgccggatgcgctggcattcttcggcggtacgcgcttcgtaccaatcatctcctcgctagtgatgggtcttgtcggcctggtgattccattagtctggccgattttcgccatgggtattagcggcttaggccatatgatcaacagcgcgggagatttcggaccgatgctgtttggtaccggtgaacgtctgctgttgccgtttggtctgcatcacattctggtggcattaattcgctttaccgacgcaggcggcacgcaggaagtctgcggtcaaaccgtcagcggtgcactgaccatcttccaggcgcaattgagttgcccaaccactcacggtttttctgaaagcgccacgcgtttcctttcgcaaggtaaaatgcctgcgtttctcggcggtctgccaggtgcagcgttagctatgtatcactgtgcgcgcccggaaaatcgccataaaattaaaggtctgctgatttctggcctgatcgcctgtgtcgttggcggcacgaccgaaccgctggaattcctgttcctgttcgtagcgccagttctgtatgtcatccacgcgctgttaaccggcctcggcttcactgtcatgtctgtgctcggcgtcaccatcggtaataccgacggcaatatcatcgactttgtggtgttcggtattttgcatggtctgtcaaccaagtggtacatggtgccagtagtggcggcaatctggtttgtcgtttactacatcatcttccgtttcgctatcacccgcttcaatctcaaaaccccggggcgcgatagtgaagttgccagttcaatcgaaaaagccgttgccggtgcgccgggtaaatcaggttacaacgttccggcaatcctcgaagccttaggcggtgccgacaatattgtcagcctcgataactgcattacgcgtctgcgtttgtctgtaaaagatatgtcgcttgttaatgtgcaggcactgaaggacaatcgggcaattggcgtagtacaacttaatcaacataacctgcaggttgttatcgggccacaagttcagtcagtaaaagatgaaatggccggtctgatgcatactgtccaggcataaggataagatatgttcgatttttcaaaggtcgtggatcgtcatggcacatggtgtacgcagtgggattatgtcgctgaccgtttcggcactgctgacctgttaccgttcacgatttcagacatggattttgccactgccccctgcattatcgaggcgctgaatcagcgcctgatacacggcgtgtttggctacagccgctggaaaaacgatgagtttctcgcggctattgcccactggttttccacccagcattacaccgccatcgatcctcagtcggtggtgtatggcccttctgttatctatatggtttcagaactgattcgtcagtggtctgaaacaggtgaaggcgtggtgatccacacacccgcctatgacgcattttacaaggccattgaaggtaaccagcgcacagtaatgcccgttgctttagagaagcagcctgacggctggttttgcgatatgggcaagctggaagccgtgctggcgaaaccagaatgtaaaattatgctcctgtgtagcccacagaatcctaccgggaaagtgtggacgtgcgatgagctggagatcatggctgacctgtgcgagcgtcatggtgtgcgggttatttccgatgaaatccatatggatatggtttggggcgagcagccgcatattccctggagtaatgtggcgcgcggagactgggcgttgctaacgtcgggatcaaaaagtttcaatattcccgccctgaccggtgcttacgggattatagaaaatagcagtagccgcgatgcctatttatcggcactgaaaggacgtgatgggctttcttccccttcggtactggcgttaactgctcatatcgccgcctatcagcaaggcgcaccatggctggatgccttacgcgtctatctgaaagataacctgacgtatatcgcagataaaatgaacgctgcgtttcctgaactcaactggcagatcccgcaatccacttatctggcctggcttgatctacgtccgttgaatattgacgacaacgcgttgcaaaaagcgcttatcgagcaagaaaagatcgcgatcatgccgggatatacctacggtgaagaaggtcgtggttttgtccgactcaatgccggctgcccacgttcgaaactggaaaaaggtgtggctggattaattaacgccatccgcgctgttggttaaccccaattgcgcaacgtaaaaaatcgttgcgcaatcgtggatttttaccctgctttgtttttataatggtgcgcacttttatatccagaaaaagagtgcgaccatgattgataccaccctgccattaactgatatccatcgccaccttgatggcaacattcgtccccagaccattcttgaacttggccgccagtataatatctcgcttcctgcacaatccctggaaacactgattccccacgttcaggtcattgccaacgaacccgatctggtgagctttctgactaaacttgactggggcgttaaagttctcgcctctcttgatgcctgccgccgcgtggcatttgaaaacattgaagatgcagcccgtaacggcctgcactatgtcgagctgcgtttttcaccaggctacatggcaatggcacatcagctgcctgtagcgggtgttgtcgaagcggtgatcgatggcgtacgtgaaggttgccgcacctttggtgtgcaggcgaagcttatcggtattatgagccggaccttcggcgaagccgcctgtcagcaagagctggaggcctttttagcccaccgtgaccagattaccgcacttgatttagccggtgatgaacttggtttcccgggaagtctgttcctttctcatttcaaccgcgcgcgtgatgcgggctggcatattaccgtccatgcaggcgaagctgccggaccggaaagcatctggcaggcgattcgtgaactgggggcggagcgtattggacatggcgtaaaagccattgaagatcgggcgctgatggattttctcgccgagcaacaaattggtattgaatcctgtctgacctccaatattcagaccagcaccgtggcggatctggctgcacatccgctgaaaacgttccttgagcatggcattcgtgccagcattaacactgacgatccaggcgtgcagggagtggatatcattcacgaatataccgttgccgcgccagctgctgggttatcccgcgagcaaatccgccaggcacagattaatggtctggaaatggctttcctcagcgcagaggaaaaacgcgcactgcgagaaaaagtcgccgcgaagtaacaaaaatggatggtgctaattgcaccatccccttttcacgcaaggcacaaagtcgcgcgatgtttggcggattcgatgcccagctcaatcaactccattacctggattgcctgacttgccggaaccggattttcaccatcgccatttaacgcatcacgaatagccgcatagtaagccggataattccccggcactgtcaacagcgtttcttcgacacgttcctcaccttccacgcgggtaagtacgccatcgcgcatatcgtagccccagtcttcctgcggcagacgctcgccatttttcagacgttcttcctgtggatcgaggccatatttcacataactgcctcgggatccatgcacgatataccgtgctgactcggctgctgccagcatggtgccgtgtaaaatcactcgccgctgcggataggacaagatagcgtggaaataatcggtcgactgcgctccgggccgtaactgtgccaaatctaccgtcatgctaaccggtaaaccaaataacgtaatggcctgatcaagaaggtgcggtgctaaatcgtaccagataccgctgcctgggccgccctgttcacgccaacgatcgcgcacctgcgggcggaagcggtcaaaatgggactcaacgtaagcaatttcacccagcacgccttccgcgagcaaacctttaagcgtcaggaaatcgctatcccagcgacggttatggaatacagacagcactcgccccaggctttttgccagcgcatccagctctcgcgcttgtgacagtgtcacggtaaagggtttatcaacgaccacatgtttacccgcctcaagcgccgctttggctaacggaaaatgggtatcgttgggtgtaggaatgacaatcaggtctatgttgggatcgttaaacagatgcttcggctcagagacaaccgtaaccgttggccagtcagcttttacttttgtttcatcgctgctggagattaccgccagctccagcccgggcgtgcccgcaatcaggggcgcatggaaggttttgctcgcataaccatacccaatcaacccaacacggatgttgtcgctcatgtcattgcctctcattgaagtatgatggctatttgacactatcctttaccctcgctcaacagtttaataacctgccagcaataagggatgttgtttaacttaagtcaaaaaaatagcgatttttccaacgacaaaagctaaatattgcaaaaacctcagtaaaaatcttgctggagctattattgctaagtaacatttaccccctgaagttaatggatcaatcaacagagatgtgggctgtaatgaatcgtcttattgaattaacaggttggatcgttcttgtcgtttcagtcattcttcttggcgtggcgagtcacattgacaactatcagccacctgaacagagtactacagtacaacacaagtaagctctgcacttgttgagcgacatgctgcccgtccgggtgcatgttttcacttgtcggatattaaaccaggaatttattatcttgttcgatgttgttgatgattgtcagggatagtaaagcgcgttactctttccagagcagtttttcatccctgaatatttgccatcagcacattcttattattgtaataacacaagcgttcacttttggtgaaattttatcatcactaataatacctacccctttggtattgattattttatggaccttttatgactgttcaggactacttattaaaatttcgcaaaatcagttcactcgaaagtctggaaaaactctacgatcatcttaattacaccctgacggacgatcaggaactgatcaatatgtatcgtgctgccgatcaccgtcgcgcagagctggtttctggcgggcgtttgtttgacctcggccaggtaccgaagtccgtctggcactatgtccagtaaagaaagtagcgatcggttataaaagccttataataacgcccctaaaattagatttgtctgtttgcgtcgctattctggagaacctatgaccaccacaacgccacaacgtattggaggctggttgcttggcccgttggcctggcttttagtcgctctgttgagtacgacgctggcgttgttgctgtataccgctgcgttatcttctccgcaaacatttcaaacgctcggcggacaagcactgacgacacaaatcttatggggcgtttcttttattaccgctatcgccatgtggtattacacactgtggttgaccatcgctttctttaaacgtcggcgttgtgttcctaaacactatattatctggctgcttatttccgtattgctggcagtaaaagcgttcgctttttcacccgtagaagatggcatagccgttcgccagttgctgtttactttgttggcaaccgcattgatcgtcccctatttcaaacgctcgtcgcgggtgaaagcgacgtttgtgaatccgtaataaccttacagttaacctgttgtcgcctgctctggattaacggataataggcggcttttttatttcaggccgaaaaatgactgactacctgttactgtttgtcggaactgtactggtcaataactttgtactggtcaagtttctcggtctctgtccgtttatgggggtttccaaaaagctggaaaccgcgatgggcatggggctggcaacaacgtttgtaatgacgctggcgtctatttgcgcctggcttatcgatacgtggattttgatcccacttaatctgatttacctgcgcaccctggcgtttattctggtgattgctgtggttgtgcagttcaccgaaatggtggtgcgcaaaaccagcccggtactttaccgtctgctggggatttttttgccgcttatcaccaccaactgtgccgtgctcggcgtggcgttgctgaatatcaatctcgggcacaatttcttgcagtcagcgctgtacggtttttccgccgctgtcggtttctcgctggtgatggtgctcttcgccgccatccgcgaacgccttgctgtggctgatgtcccggcaccttttcgcggtaatgccattgcgttaattaccgcaggtcttatgtctctggcctttatgggctttagtggtttggtgaagttgtaatgaatgctttctggattgccgttgccgccgtgagcctgctgggcctggcgtttggcgccattctgggttatgcctcccgccgttttgcggtggaagacgatccggtcgttgagaaaattgacgaaatcttaccgcagagccagtgtggtcagtgcggttatcccggctgtcgcccctacgcggaagccatcagctgtaacggtgaaaaaatcaaccgttgcgccccaggtggcgaagctgtgatgctaaaaattgccgagttgcttaatgtcgagccgcagccgctggatggcgaagcgccagagctaacgccagcgcggatggtggcggttattgatgaaaataactgtattggctgcactaaatgtattcaggcgtgtccggtagacgccatcgttggcgctacccgcgccatgcatacggtaatgagtgatctctgtacgggctgcaatttatgtgttgatccgtgcccgacgcactgcatctcgttgcaaccggtcgcagaaactcctgactcctggaaatgggatctgaacaccattcccgtgcgtatcattcccgtggaacaccatgcttaagttattctctgcattcagaaaaaataaaatctgggatttcaacggcggcatccatccaccggagatgaaaacccagtccaacggtacgcccctgcgccaggtaccactggcgcagcgttttgtcattccactgaaacaacatattggcgctgaaggtgagttgtgcgttagcgtcggcgataaagtattgcgcggccagccgcttacccgtggtcgcggcaaaatgctgcctgttcacgcgcccacctcgggtaccgttacggctattgcgccccactctacgtctcatccttcagctttagctgaattaagtgtgattattgatgccgatggcgaagactgctggatcccgcgcgacggctgggccgattatcgctctcgcagtcgcgaagagttaatcgagcgcattcatcagtttggtgttgccgggctgggtggtgcgggatttccgacaggcgttaaattgcagggcggtggagataagattgaaacgttgattatcaacgctgctgagtgcgagccgtacattaccgccgatgaccgtttgatgcaggattgtgcggctcaggtcgtagagggtatccgcatccttgcgcatattctgcagccacgcgaaattcttatcggtattgaagataacaaaccgcaggcgatttccatgctgcgtgcggtgctggcagactctcacgatatttctctgcgggtgattcccaccaaatatccttctggcggtgctaaacaattaacctacattctgaccgggaagcaggttccacatggcgggcgttcatccgatatcggcgtattaatgcaaaacgtcggcaccgcttatgcagtgaaacgtgccgttattgatggcgagccgattaccgagcgtgtcgtgaccctgactggcgaagcaatcgctcgcccgggcaacgtctgggcacggctgggtacgccagtgcgtcatttattgaatgatgccggattctgcccctctgccgatcaaatggtgattatgggcggcccgctaatgggctttaccttgccgtggctggatgtcccggtcgtaaagattaccaactgtcttttggctccctctgccaatgaacttggcgaaccacaggaagaacaaagttgcatccgttgtagcgcctgtgctgacgcctgccctgcggatcttttgccgcaacagctgtactggttcagcaaaggtcagcaacacgataaagccaccacgcataacattgccgactgcattgaatgtggggcttgcgcgtgggtttgcccgagcaatatccccctggtgcaatatttccgtcaggaaaaagctgaaattgcggctattcgtcaggaagaaaagcgcgccgcagaagccaaagcgcgtttcgaagcgcgccaggctcgtctggagcgcgaaaaagcggctcgccttgaacgacataagagcgcagccgttcaacctgcagccaaagataaagatgcgattgctgccgctctggcgcgggtgaaagagaaacaggcccaggctacacagcctattgtgattaaagcgggcgaacgcccggataacagtgcaattattgcagcacgggaagcccgtaaagcgcaagccagagcgaaacaggcagaactgcagcaaactaacgacgctgcaaccgttgctgatccacgtaaaactgcagttgaagcggctattgcccgcgccaaagcacgtaagctggaacagcaacaggctaatgcggagccagaagaacagattgatccgcgcaaagccgccgtcgaagcggctattgcccgtgccaaagcacgcaagctggaacagcaacaggctaatgcggagccagaagaacagattgatccgcgcaaagccgctgtcgaagcggctattgcccgtgccaaagcacgcaagctggaacagcaacaggctaatgcggagccagaagaacagattgatccgcgcaaagctgccgtcgaagcggctattgcacgcgccaaagcgcgcaagctggaacagcaacaacaggctaatgcggaaccagaagaacaggtcgatccgcgcaaagccgccgtcgaagcggctattgcacgcgccaaagcgcgcaagctggaacagcaacaacaggctaatgcggaaccagaagaacaggttgatccacgcaaagcggcagttgctgcggctattgcccgcgttcaggccaaaaaagccgcccagcaaaaggttgtaaacgaggactaaatggtattcagaatagctagctccccttatacccataaccagcgccagacatcgcgcattatgctgttggtattgctcgcagccgtgccaggaatcgcagcgcaactgtggttttttggttggggtactctcgttcagatcctgttggcgtcggtcagtgctcttctggccgaagctctcgtcctcaaactacgcaagcagtcggtagctgcaacgttgaaagataactcagcattgctgacaggcttattgctggcggtaagtattccccccctcgcgccatggtggatggtcgtgctgggtacggtgtttgcggtgatcatcgctaaacagttgtatggcggtctggggcaaaacccgtttaatccggcaatgattggttatgtggtcttactgatctccttcccggtgcagatgaccagttggttaccgccacatgaaattgcggtcaacatccctggttttatcgacgccatacaggttattttcagcggtcataccgccagtggtggtgatatgaacacgctacgcttaggtattgatggcattagtcaggcgacaccgctggatacattcaaaacctctgtccgcgcaggtcattcggttgaacagattatgcaatatccgatctacagcggtattctggcgggcgttggttggcaatgggtaaatctcgcctggctggctggcggcgtatggttgctgtggcagaaagcgattcgctggcatattcccctcagcttcttagtaacgctggcgttatgcgcaacgttgggctggttgttctcaccagaaacactggcagcaccgcaaattcatctgctgtctggagcgaccatgctcggcgcattctttattttgactgacccggttaccgcttctacgaccaatcgtggtcgtcttattttcggcgcgctggcgggcttattagtctggatgatccgcagtttcggcggctatcctgacggcgttgcttttgccgtcctgctggcgaacatcacggttcctctgatcgattactacacgcgtccgcgcgtctacggccatcgcaaagggtaaaccatgctgaaaactatccgaaaacacggcattacgttggcgctctttgcagcgggttcaacagggttaactgcggccatcaaccagatgaccaaaacgacaattgctgaacaggccagtctgcaacaaaaggcgttatttgatcaggtgctgccagctgaacgctataacaatgcgctggcacagagttgctatctggtaactgcgccagagttaggtaaaggtgagcatcgggtttacatcgccaaacaggatgacaaaccggtagctgccgttctggaagcaaccgcgccagatggctattccggtgcgattcagctgctggtgggagccgattttaacggcacggtacttggcacgcgcgtgactgagcaccacgaaacgccagggcttggcgataaaatcgaactgcgcctttctgactggatcacccattttgcgggtaaaaaaatcagtggtgcggatgatgcgaactgggcggtgaagaaagatggtggtgatttcgaccagttcaccggcgcgacgattactccccgcgcggtggttaatgcggtaaaacgcgccggattgtacgctcagacgttaccggcacaactttctcaacttcctgcctgtggagaataaaacgtgagcgaaattaaagacgttattgttcaggggttgtggaaaaacaactctgcgctggtccagttgctcggcctttgtccgctgttggcggtcacgtccactgccactaacgctctgggtttaggacttgcgactacgctggtactgacgctaaccaacctgaccatttcgacgctgcgtcactggacgcccgccgagatccgcattcccatttacgtgatgatcatcgcctcggtggtcagcgctgtacagatgctgatcaacgcctacgcctttggcctgtatcaatcattagggatttttattccgctgattgtcactaactgtatcgttgtgggccgcgctgaagccttcgccgccaaaaaaggtccggcgctttcggcactggacggcttttcaattggtatgggcgcaacctgcgccatgttcgtgctgggttcactacgcgaaattatcggcaatggcacgttgtttgacggtgcagatgcgctgttaggtagctgggcgaaagtattacgcgtggagattttccacaccgactcccctttcctgctggcgatgctgccaccaggtgcatttattggcctgggactgatgctggcaggaaaatacctgattgatgaaaaaatgaaaaagcgccgtactgaagcagttgccgaacgtgcattgccaaacggtgaaacagggaatgtctgatgaacaaagcaaaacgcctggagatcctcactcgcctgcgtgagaacaatcctcatcccaccaccgagcttaatttcagttcgccttttgaattgctgattgccgtactgctttccgctcaggcgaccgatgtcagtgttaataaggcgacggcgaaactctacccggtggctaatacgcctgcagcgatgcttgaactgggcgttgaaggggtgaaaacctatatcaaaacgattggcctttataacagcaaagcagaaaatatcatcaaaacctgccgtatattactggaacaacataatggcgaggttccggaagatcgtgctgcgcttgaagccctgcctggtgtaggtcgtaaaacagccaacgtcgtattaaacactgcattcggctggccgactattgctgtcgacacgcacattttccgcgtttgtaatcgtacacaatttgcgccggggaaaaacgtcgaacaggtagaagaaaagctactgaaagtggttccggcagagtttaaagtcgactgccaccattggttgatcctgcacgggcgttatacctgcattgcccgcaagcctcgctgtggctcttgtattattgaagatctttgtgaatacaaagagaaagttgacatctaaagatcaggggtaacaccgattaccccattcataacctttctttatcctcttttaaaacatctttttaacgtcaatgatgccattgcttagcgttatcatcaggtaatccgtttgcagataaccaaaaatgcaggttaattgtttttttaatagcgaaattttctattcattcgtgatcaagatcacgatgctgtggcaatgtaaaaacattgcaagaatcaggttaaaatcatttaaatttacacacgcaacaaatattgacctacaaaacattacactggctatttttcagaaactggactatctcactaggaaaaacgccaaatagtagaacatatcgccattaagccatcatcaccctctcagggtagtgaaaaaatctgccgttacgttttttgaaaaatttaacgctggataacatttcccggaatggttgaattccccgcctcagttatatgtaacagattattacaaaggacttgtctgaaagtgcaagatagtgaacattacctgccgtttcccctcccactataacaattgcgcgtatgttttttagacataacgcgagaaagcacccccgttaatatgggatgtaaaaaaagaggtaaaagtgtccactgcaaaccaaaaaccaactgaaagcgtcagtttgaacgcttttaaacaacctaaggcgttctatctcatcttctcgattgagttatgggaacgttttggttattacggcctacaaggaattatggctgtttacctggttaaacaactgggtatgtctgaagcggattcaatcacccttttctcttcctttagtgccctggtttatggtctggtcgctatcggcggctggttaggtgacaaggtactgggtactaaacgcgtaattatgctcggcgctattgtgctggcgattggttatgctctggttgcctggtctggtcacgacgctggtatcgtttatatgggtatggcggctattgcggtcggtaacggcctgtttaaagctaacccgtcttctctgctttctacatgctatgagaaaaacgacccgcgtctggacggtgcattcaccatgtactacatgtccgtcaacatcggctctttcttctctatgattgctacgccgtggctggccgcgaaatacggctggagtgttgcgtttgcgttgagcgttgtaggcctgctgatcactatcgttaacttcgccttctgccaacgttgggttaaacagtacggttcaaaaccagacttcgagcctatcaactaccgtaacctgctgctgaccattattggtgttgtggcactgatcgctatcgccacctggctgctgcacaatcaggaagttgcgcgtatggcgctgggcgttgttgccttcggtatcgtggttatcttcggtaaagaagccttcgcgatgaaaggtgctgcgcgtcgtaaaatgatcgttgccttcatcctgatgctcgaagccattatcttcttcgtgctttatagccagatgccaacgtcactgaacttctttgcgattcgtaacgttgaacacaccattctgggcctggccgtagaacctgagcagtatcaggcactgaacccgttctggatcatcattggtagcccgattctggccgctatctataacaagatgggcgataccctgccaatgccaaccaagtttgctatcggcatggtgatgtgttctggtgcgttcctgattctgccgctgggtgcgaaattcgcgtctgacgctggtatcgtgtctgtaagctggctggtcgcgagctatggcctgcagagtatcggggaactgatgatctctggcctgggtctggcaatggttgcacaactcgttccgcagcgtctgatgggcttcattatgggtagctggttcctgaccactgccggtgcaaacctgattggtggttatgttgcaggtatgatggctgtgccggataacgttaccgatccgctgatgtcactggaagtctatggtcgcgtattcttgcagattggtgtcgctactgccgttattgcagtactgatgctgtttaccgcgccgaaactgcaccgcatgacgcaggatgacgctgcagacaaagcggcgaaagcagccgtagcgtaaaattcagggaaactcttttacaagccgctaacttttcgttagcggctttttttttgttcagcaacgcactaccatactttaaaccacagacaaaaggagttaccgatgaaattgttctacaaaccgggcgcctgctctctcgcttcccatatcaccctgcgtgagagcggaaaggattttacgctcgtcagtgtggatttaatgaaaaaacgtctcgaaaacggtgacgattactttgccgttaaccctaagggacaggtacctgcattgctgctggacgatggtactttgctgacggaaggcgtagcgattatgcagtatcttgccgacagcgtccccgaccgccagttgctggcaccggtaaacagtatttcccgctataaaaccatcgaatggctgaattacatcgccaccgagctgcataaaggtttcacacctctgtttcgccctgatacaccggaagagtacaaatcgacagttcgcgcgcagctggagaagaagctgcaatatgtgaacgaggcactgaaggatgagcactggatctgcgggcaacgatttacaattgctgatgcctatctgtttacggttctgcgctgggcatacgcggtgaaactgaatctggaagggttagagcacattgcggcatttatgcaacgtatggctgaacgtccggaagtacaagacgcgctgtcagcggaaggcttaaagtaatagccatcggcccacaggtcgttgtgggccgaaatgagatatttcagagctttgttgcgctgaaataatgttctggattggcaatacgatcctgagcagcaaccacttgcagctcatattcctgcattgcttttgtggtcaccatgatttcgtatactgcagcggtcacatgttccagggcctcctgcagcgttgccccctgaagcagtttcaccagcagtaaaccgctcgtcacatcaccaacacctaccggctggcgcataccaaaatctaccagcggacggctgatatgccaggcttcatcggcggtgactagcagcatttcaaaacggtcacggctgtagccagctcgcgccaggtgtttaaccaacacaatttgtggcccttgcgcaatgagttcgcgcgctgccagaaccgcttcttcgacgttctttaccggatgctcacagagtatttccagctcaaccagattcggcgcaatgatatcgctggcaggcaaaccgtgccgcacatgaaactctgcgacacccggtgcaacgatacagcctttttccggatgacccattaccggatcgcaaaaatatttcgcctgtggattcgctgctttcacctgacgaacgataccgaggatatgttcaccctgctccgccgatcccagatagccacttaatacggcatcacaggtgtgtaatttatcaatggcggcaatgccttgcacaatttcggttaaatggctgggcggcatcacgcagccagtccatttgccgtattgggtgtgattagaaaattgaacggtgttcagcggccagacgttcgcgcccaggcggcgcatcggaaactctgccgcactgttacccgcatgaccataaacaacgtgagactggatagcgagaatatttttcatcatgttccctgtataaaaaccagggggagtgatttctcactccccctttccacttaatgcattatttccagcaaatcagacagtaattctttttgccacgacgcagtaaggtaaaacgaccaaacagacgatcttcttctttaaagaagtattcaggatcggactgtttttcaccgttaatggtgatggcattggaggcgatagttttacgcgcctgaccacgggaaggttgcagttcagaatcgaccagcgcctgcatcaggtctgcgcccttttccatctcaaccatcggtacgccgtcctgcgccagctgttcgaagtccgcttcactcagcgcactcaaggaaccgctgaacaggcattcggtaatacgttttgccgcctgcaaaccgtcttcaccatgcaccagacgtgtcacctgttctgcaagcacatactgggcgcgcggtgctttaccgctgtttttatcttcttcttccagggcgttgatctcttcaatgctcatgaaggtgaagaacttcaggaagcggtaaacgtcggcatccgcagtgttgatccagaactggtagaatttgtacgggctggttttcttcggatccaaccagactgcgccgccttcagttttaccaaatttggtgccgtctgctttggtgatcagcggaacggtcaagccaaacacctgattctgatgcagacgacgggtcaggtcgataccagaagtgatgttaccccactggtcagaaccaccgatttgcagcaccacaccgtactgtttgttcagacaggcgaagtcataaccctgcaacaggttgtaggaaaactcagtgaacgaaatcccctgatcttcacggttgagacgctgcttaaccgcttctttgttgatcatctggttaacggagaagtgtttgccaatatcgcgcaggaaggtcagcacattcatattgccgaaccagtcatagttgttcgccgcgatagcagagttttctccacagtcgaaatcgaggaacggggcaacctgcttgcggattttgtccacccactcctgaacagtttcttcagtgttcagcttacgctcggcagctttgaagctcgggtcgccaatcagacccgtcgcgccgcctaccagcgcaaccggcttgtggcccgcctgctggaagcgtttcaggcataacaatggaacaagatgccccaaatgcaagctgtcagcggtaggatcgaagccgcaatagagcgcgatcgggccttgcgccagtcgctctgctaacgcttcctcgtccgtcacctgggctaccagcccccgctcttgcaattgtttaatcaagttactgcttgccatcaaaatctccatgtatataacgactgcacctttgccggtacacgacttttcgccagatgcgaaagagacatagaataaagtgccagaatcaggagtaccagcgattaaagcaagatttttgcatcttttcagggtgcaagacgatcaatcttccacgcatcattttcacgctggtacaaaaagcggtcatgcaggcgatgctcaccgccctgccagaactcaatctgttcaaggctgacgcgaaaaccgccccaaaaacttggcaatggcacttcgccctgttgaaacttctgcttcagctccaggaatttactttcaaggataccgcgggcagaaatgcgactggactgcttcgaaacccatgccccaatctggctatcacgcgggcggctatgaaaatatttcatcacttcgagagtcgaaagtcgttccgctttaccgatcaccatcacctggcgttcaagggtatgccacgggaacagcaggctaacgcgcggattattttcgatttgatgtgctttacggctgccgaggttggtgtaaaacaccatgcctttttcgtcgtaatgtttgagtaaaacaatgcgctgataaggctgatcatgttcatccacggtagcgaccaccatcgcggtagggtcagccagtttggcttcacaagcctgagagagccaacgttcaaaaagggttaatggatcggcgggtagatcgcggcggcgtaacccgcctttggtgtattcacggcgcagatgcgcgatttgctgcaattcgtcgttatcagacatggttttctttacggattgtcagtgggtgacgctattgtgcgccgcccctggaaaaatctcaacgctgcggattttgtaactgacagttattcaagacgatgcggtcgcgtttatagacagtcgcttcctcgcctttcgaccagaaaacatagattccgtcggtgtaacgtgcaccagacgctgaaatgccctgtttgagatgcagtagttgattatcgtaaacaaaactgacttcctggcgcggattattcagtttgaccgtcaacggtttttcatcacactggtattccagcgtatcggtttgcatgcgctcaaccagttgattgaacgcgctacagccggtgagaagcaccggcaaacagatcagtaacagttttttcatagacatatcccgaagactttcctggtctggagggcaatacgccctccctaacgttccaagtgtaacggcagacgcggtaagaaaaattcagttaactctgatatcacgggttagcggggaaaatagcccccagtaccgtctcctggcttgcgccagtgacggaaggcagatttcctggtaatcccgccagcgttcgccaggcaagccaggcgaacgccaatgcttccatgtcatcgccactaatgccaacggcatcggtggtggtgacttctgtgcctggcagtaatgccgccagacgcgccatgagtagcggattacgactacctccaccacataccatcaatcgttcgcagccaccgctcaacaaaacttgttcagaaatggtcacggcggtgagttctgccagtgtggcctgcacatcacggggatcaacccccggaaaatggcgcaaatggcgctccagccagccgtagttaaagtattcgcgtccggtgcttttcggtgcgggttgcgagaaatatgggtcgcagagcatattttgcagcagtgggagaataactttacccgcccgtgcccactcggcatctttatcgtaaggtttaccggcctgacgccagatccaggcatccatcagcatgttaccaggaccggtatcgtagcccccaaccggctggccaggaatgagcagtgacagattggcgatgccgccaatattgagcaccattcgtcgctcggttgggtgagccagcagcgcatgatggaacgcaggtaccagcggtgcaccttgtcctcccaaggcaatatcgcgacggcgaaaatcaccgacaaccgtaattccggtgcgcgccacaatttgattgttatcgccaatctgtaaagtgtgtggtgccacgcccgtcggttcgtgccagacggtttgaccgtggcagccgatcgcaactatatctctcgcctgcaggttttgttccttaagcaaggcattgaccgcatcagcaaaaagtcgcccaagttgagtatcaagctgtccaaactgcgaaagtgtaagctgctggccctggcaaatatccagtacagcctgtttcagagacaccgggatcggccagctcaaacttgccagctgtgcgacccggtgttcatcaattgtcgccaacacaacatcaacaccatcaaggctggtgcctgacataacgccaataaagcggcccgatttcatagttcatcctttttcaatctgacgtttgcgcaccactcaaacataaacttttcgtgaataccatgcggaatgaccaatttttaccgttggtagtaaaacattatcttcaaatcaataatcatcatgaatattttgtttataattggttgatcctactttcattatgatttgctcatatttggtagaacatgtaaccatggattcacatatgccatatactttgaccatgagggatgcttgcgtggcgtttcatggtgaacaggagatttttcaatgattaaacgcgtattggttgtttcaatggtaggtctgtctcttgtcggttgtgttaataacgacaccctgtcaggggatgtttataccgcttctgaagcgaaacaagtacagaatgtcagctatggcaccatcgttaatgtacgtcaggtacagattcagggcggtgatgattccaacgttatcggcgcaattggtggtgctgtacttggtggtttcctgggaaatactattggcggcggaaccgggcgttctctggctactgcagcaggggctgttgcaggtggtgtagccggtcagggcgtacagagtgcaatgaacaaaacgcagggtgtcgagctggaaattcgtaaagatgatggcaacaccatcatggtggtacagaaacaagggaacactcatttctctccaggccaacgtgtcgtactggccagcaatggcagtcaggtgaccgtttccccgcgctaaataagtttgcgtgtggtcaggttactgaccacacgcccccttcatttcaccctttggcctgtaactcaatgatattatgctcaagttttgcgatgagcttaatcagttgttccagttcctctgcggagatgccatgtaaaatttccgcgcgggttttgttaataacggcttccatttcgctgatcaatggctctgccttttccgtcagtttaatacgtttagcccgacgatcgctggcacaagtttgacgcgaaattaaccctttttcttccagttggtccagcgtacggaccagtgatggctgctcgatgccaatcgcttttgccagttgaatttgcgactggtctggaggtaactgatggatattgtgtaacgtaacccaatgggtttgtgttaactccagcggtttcaggcgatggtctatcagagcacgccatatgcgcaccaaccgtgccagatcagaacctagtggcgattccaatttcatctccttataattagcttgctaagatattatgcggcttttagaatagtgtgcagcaattgtattgctaaaacaaatgtattgctgcatttggttaccgtcagacatatttttcagaaattgcgcgtaaatttttcgcacttaaagaatatttattaatctaacgcaatatattctgtcgtaaaggaatctactttgtgaagtttatgctcaatgcaacaggattgcccttacaagatctggtgttcggtgcatccgtctactttcctccgtttttcaaagccttcgcgtttggattcgtcatctggcttgtcatacaccgcctgcttcgtggctggatctacgctggtgacatctggcatcccttgttaatggatttatcgctgtttgcgatttgcgtttgccttgctctggcaatactgattgcgtggtaactatgtcaattaaaacaattaagtatttctcaacaatcattgtagcggtagttgcggttcttgccggatggtggctgtggaattattacatgcaatctccgtggacacgcgacgggaaaatacgcgcagaacaggtttctatcaccccacaggtgtcgggacgtattattgagctgaatataaaagacaaccagctggttaacgcgggggatcttctgctcacgatcgataaaacgccctttcagatcgccgagctgaacgcacaggctcagctggcgaaagcgcaatctgacctcgcaaaagccaataacgaagcgaatcgtcgtcgtcatctctcacaaaattttatttctgccgaagaactcgataccgctaacctcaatgttaaagcgatgcaggccagcgttgatgccgcacaggcgacgctgaaacaggcacaatggcaactggcacaaacggaaattcgcgccccggtgagtggatgggtgactaatctcactacccgcatcggcgactacgctgacaccgggaaaccgctgtttgcccttgtcgacagccactcgttttacgtcattggttattttgaagaaaccaagttgcgccatatccgcgaaggtgcaccagcacaaattaccctctatagtgataacaaaacgttacagggtcacgtgtccagtatcggtcgggcgatttatgatcagagcgttgaaagtgactcaagccttattccggatgtgaaacctaacgtcccctgggttcgcctcgcccaacgcgttcccgtccgctttacgctggataaagtcccaggcgatgtcacgctggtgtcgggcaccacctgtagcattgccgtaggtcaataatgaacgcatcgtcatggtccttgcgcaatttgccctggttcagggccacgctggcgcaatggcgttatgcgttacgcaataccattgccatgtgtctggcgctgacggttgcctattatttgaatcttgatgagccctattgggcgatgacctcggctgcggtggttagctttcccaccgttggcggtgtcatcagcaaaagcctcggacgcatcgctggcagtttgctcggagccattgcggcactgcttcttgccggacatacgctcaatgagccgtggttttttctattgagcatgtcggcgtggcttggcttttgtacctgggcctgtgcgcacttcacgaataacgtcgcgtatgcatttcaactggcgggctacacggctgccatcatcgcctttccgatggttaatattactgaggccagccagctgtgggatatcgctcaggcgcgtgtttgcgaggtgatagtcggtattttgtgcggcggcatgatgatgatgatcctgccgagcagttccgatgctacagcccttttaaccgcattgaaaaacatgcacgcccgattactggaacatgccagtttactctggcggcctgaaacaaccgatgccattcgtgctgcacatgaaggggtgattgggcagatactgaccatgaatttgctgcgtatccaggctttctggagccactatcgttttcgccagcaaaacgcacgccttaatgcgctactccaccagcaattacgtatgaccagtgtcatctccagcctgcgacgtatgttgctcaactggccctcaccgccagatgccacgcgagaaattctcgaacagctgctgacggcgctcgccagttcgcaaacagatgtttacaccgtcacacgtattatctccccactacgcccgaccaacgtcgccgactaccggcacatcgccttctggcagcgactacgttatttttgccgcctttatctgcaaagtagtcaggaattacatcgtctgcaaagcggtgtagatgatcgtgccagactcccacggacatccggcctggctcgtcataccgataacgccgaagctatgtggagcgggctgcgtacattttgtacgttgatgatgattggcgcatggagtattgcttcgcaatgggatgcaggtgccaatgcattaacgctggcagcgattagctgcgtactctactccgccgtcgcggcaccgtttaagtcgttgtcactgctgatgcgcacgctggtgttactttcgctattcagctttgtggtcaaatttggcctgatggtgcagattagcgatctgtggcaatttttactgtttctctttccactgctggcgacgatgcagcttcttaaattgcagatgtccaaatttgccgcactgtgggggcaactgattgtttttatgggttcgtttatcgctgtcactaatccccccgtgtatgattttgctgattttcttaacgataatctggcaaaaattgttggcgtcgcgttggcgtggttagcgttcgccattctgcgtccaggatcggatgctcgtaaaagccgccgccatattcgcgcgctgcgccgggattttgtcgatcaactaagccgccatccaacactgagtgaaagcgaatttgaatcgctcacttatcatcacgtcagtcagttgagtaacagccaggatgcgctggctcgccgttggttattacgctggggtgtagtgttgctgaactgttctcatgttgtctggcaattgcgcgactgggaatcgcgttccgatccgttatcgcgagtacgggataactgtatttcactgttgcggggagtgatgagtgagcgtggcgttcagcaaaaatcactggcggccacacttgaagaattacagcgaatttgcgacagccttgcccgtcatcatcaacctgccgcccgagaactagcggcaattgtctggcggctgtactgctcgctttcgcaacttgagcaagcaccgccgcaaggtacgctggcttcttaattacttaattacaccacaggcatagcgttcaccgccaccgcccagcggtttgggttgatcggacatattatcgccgccaacgtggaccatcagcgctttgtctttgacttcatccagtgatttcagacgaggcgcgatgacggcatcggtcgccttgccgtcattattgactaccagtgcaggcagatcgcctaaatgcccggcaccttctggcccttcatgtttaccggtattttgtggatcaagatgcccgcctgcggattctgcggcgctggctttgccatctttggtggctggctggcagcttcctttggcatgaatatggaagccatgttcaccgggaggtaatgctttcagatcgggcgaaaactccagacctttatcggtttcagtaatggtgacgctaccaattgactgcccaaccccttgcgacgtgacgaggttcatctcgactttttcactggcagcttgtgcgccggtcgcaacaaccagcgccagaatggccagactaaaacgtttcataggacctccgttcattgtgcattcctgaataagtgtaaaccagtgacacatttttgaacggcggctattcctaaaagtgcttacggtacgtcgtaacctagtgccgctttacggatacgaaaccattgttgacgggtcattttcagtgtttctgcttcgacagctgcccgtacgcgctcaattttacctgagccgataattggcagcggctgcgacggtaaacgtagtacccaggcgtaaactacctgttcaatcgagcccgcgtttaactcctctgccaccacagccagttcatcacgcagcggctggaaataatcatcattaaacagacgaccaccaccaaggcaggaccacgccatcggacgaatacgcagttgttgcagttggtcgagcgtgccatccagcagtaacggctgatgcaccggggatatttccacctgattagtggcaagagtaaatggcaggcgtgattgcaacagcgcaaattgcgcag

(The sequence listing continues in the following parts.)

What is claimed is:

1. An engineered E. coli Nissle strain having increased transformation efficiency relative to wild type E. coli Nissle, deposited under ATCC accession number PTA-______, or a derivative thereof.

2. The engineered E. coli Nissle strain of claim 1, wherein the derivative comprises a genome sequence having at least 95%, at least 98%, at least 99%, at least 99.5% at least 99.6% at least 99.7% at least 99.8%, or at least 99.9% sequence identity to SEQ ID NO: 2.

3. The engineered E. coli Nissle strain of claim 1, wherein the derivative comprises all of the mutations set forth in Table 5.

4. The engineered E. coli Nissle strain of claim 1, wherein the derivative further comprises a heterologous polynucleotide.

5. The engineered E. coli Nissle strain of claim 1, wherein the derivative further comprises one or more additional mutations.

6. A method of obtaining an E. coli transformant comprising transforming a heterologous polynucleotide into the engineered E. coli Nissle strain deposited under ATCC accession number PTA-______.

7. The method of claim 6, wherein the transforming comprises electroporation or heat shock.

8. The method of claim 6, wherein the transformation efficiency is increased at least 2-fold, at least 3-fold, at least 4-fold, at least 5-fold, at least 6-fold, at least 7-fold, at least 8-fold, at least 9-fold, or at least 10-fold relative to the wild type E. coli Nissle strain.

9. A probiotic composition comprising the engineered E. coli Nissle strain deposited under ATCC accession number PTA-______, or a derivative thereof.

10. The probiotic composition of claim 9, further comprising a prebiotic.

11. The probiotic composition of claim 9, further comprising pharmaceutically acceptable carrier.

12. The probiotic composition of claim 9, wherein the composition is formulated as a powder, a granule, a tablet, a capsule, a liquid suspension, a paste, or a syrup.

13. The probiotic composition of claim 9, wherein the derivative comprises a genome sequence having at least 95%, at least 98%, at least 99%, at least 99.5% at least 99.6% at least 99.7% at least 99.8%, or at least 99.9% sequence identity to SEQ ID NO: 2.

14. The probiotic composition of claim 9, wherein the derivative comprises all of the mutations set forth in Table 5.

15. The probiotic composition of claim 9, wherein the derivative further comprises a heterologous polynucleotide.

16. The probiotic composition of claim 9, wherein the derivative further comprises one or more additional mutations.

17. A method for establishing or maintaining a healthy gastrointestinal microbiota or reducing the effects of a gastrointestinal disorder in a subject, the method comprising: administering to the subject a composition comprising the engineered E. coli Nissle strain deposited under ATCC accession number PTA-______, or a derivative thereof.

18. The method of claim 17, wherein the composition further comprises a prebiotic.

19. The method of claim 17, wherein the composition further comprises pharmaceutically acceptable carrier.

20. The method of claim 17, wherein the composition is formulated as a powder, a granule, a tablet, a capsule, a liquid suspension, a paste, or a syrup.

21. The method of claim 17, wherein the derivative comprises a genome sequence having at least 95%, at least 98%, at least 99%, at least 99.5% at least 99.6% at least 99.7% at least 99.8%, or at least 99.9% sequence identity to SEQ ID NO: 2.

22. The method of claim 17, wherein the derivative comprises all of the mutations set forth in Table 5.

23. The method of claim 17, wherein the derivative further comprises a heterologous polynucleotide.

24. The method of claim 17, wherein the derivative further comprises one or more additional mutations.

25. The method of claim 17, wherein the composition is administered orally or rectally.

26. The method of claim 17, wherein the subject is a mammal.

27. A method of altering a target nucleic acid sequence within an E. coli cell, the method comprising:
providing a cell of the engineered E. coli Nissle strain of claim 1 with a Cas protein, a guide RNA, a donor nucleic acid sequence, and a recombinase.

28. The method of claim 27, wherein the guide RNA and the Cas protein co-localize at the target nucleic acid sequence, the Cas protein cleaves the target nucleic acid sequence, and the donor nucleic acid sequence is inserted into the target nucleic acid sequence.

29. The method of claim 27, wherein the recombinase is a λ-Red recombination system.
